United States Patent Application Publication US 2019/0002960 A1 - sequence listing, part 3

SEQ ID NO: 3 - DNA, 2736560 bp, Staphylococcus aureus subsp. aureus 6850 (residues 1-1,368,280 of 2,736,560)
attaacttgtggataattattaacatggtgtgtttagaagttatccacggctgttatttttgtgtataacttaaaaatttaagaaagatggagtaaatttatgtcggaaaaagaaatttgggaaaaagtgcttgaaattgctcaagaaaaattatcagctgtaagttactcaactttcctaaaagatactgagctttacacgatcaaagatggtgaagctatcgtattatcgagtattccttttaatgcaaattggttaaatcaacaatatgctgaaattatccaagcaatcttatttgatgttgtaggctatgaagtaaaacctcactttattactactgaagaattagcaaattatagtaataatgaaactgctactccaaaagaaacaacaaaaccttctactgaaacaactgaggataatcatgtgcttggtagagagcaattcaatgcccataacacatttgacacttttgtaatcggacctggtaaccgctttccacatgcagcgagtttagctgtggccgaagcaccagccaaagcgtacaatccattatttatctatggaggtgttggtttaggaaaaacccatttaatgcatgccattggtcatcatgttttagataataatccagatgccaaagtgatttacacatcaagtgaaaaattcacaaatgaatttattaaatcaattcgtgataacgaaggtgaagctttcagagaaagatatcgtaatatcgacgtcttattaatcgatgatattcagttcatacaaaataaagtacaaacacaagaagaatttttctatacttttaatgaattgcatcagaataacaagcaaatagttatttcgagtgatcgaccgccaaaggaaattgcacaattagaagatcgattacgttcacgctttgaatgggggctaattgttgatattacgccaccagattatgaaactcgaatggcaattttgcagaagaaaattgaagaagaaaaattagatattccaccagaagctttaaattatatagcaaatcaaattcaatctaatattcgtgaattagaaggtgcattaacgcgtttacttgcatattcacaattattaggaaaaccaattacaactgaattaactgctgaagctttaaaagatatcattcaagcaccaaaatctaaaaagattaccatccaagatattcaaaaaattgtaggccagtactataatgttagaattgaagatttcagtgcaaaaaaacgtacaaagtcaattgcatatccgcgtcaaatagctatgtacttgtctagagagcttacagatttctcattacctaaaattggtgaagaatttggtgggcgtgatcatacgaccgtcattcatgctcatgaaaaaatatctaaagatttaaaagaagatcctatttttaaacaagaagtagagaatcttgaaaaagaaataagaaatgtataagtaggaaactttgggaaatgtaatctgttatataacagcactaataataactatcattttttacatttctatatgctaatgtggcaagatgagcaaaactcattttgtggataatgtttaaaagtcatacacaccatacacaagttatcaacatgtgtataacttcgccaaatctatgtttttaagacttatccaccaatccacagcacctactactattactaagaacttaaaacctatataattatatataaacgactggaaggagttttaattaatgatggaattcactattaaaagagattattttattacacaattaaatgacacattaaaagctatttcaccaagaacaacattacctatattaactggtatcaaaatcgatgcgaaagaacatgaagttatattaactggttcagactctgaaatttcaatagaaatcactattcctaaaactgtagatggcgaagatattgtcaatatttcagaaacaggctcagtagtacttcctggacgattctttgttgatattataaaaaaattacctggtaaagatgttaaattatctacaaatgaacaattccagacattaattacatcaggtcattctgaatttaatttaagtggcttagatccagatcaatatcctttattacctcaagtttctagagatgacgcaattcaattgtcggtaaaagtacttaaaaacgtgattgcacaaacgaattttgcagtgtccacctcagaaacacgcccagtactaactggtgtgaactggcttatacaagaaaatgaattaatatgcacagcgactgactcacaccgcttggctgtaagaaagttgcagttagaagatgtttctgaaaacaaaaatgtcatcattccaggtaaggctttagctgaattaaataaaattatgtctgacaatgaagaagacattgatatcttctttgcttcaaaccaagttttatttaaagttggaaatgtgaactttatttctcgattattagaaggacattatcctgatacaacacgtttattccctgaaaactatgaaattaaattaagtatagacaatggggagttttatcatgcgattgatcgtgcatctttattagcacgtgaaggtggtaataacgttatcaaattaagtacaggtgatgacgttgttgaattatcttctacatcaccagaaattggtactgtaaaagaagaagttgatgcaaacgatgttgaaggtggtagcctgaaaatttcattcaactctaaatatatgatggatgctttaaaagcaatcgataatgatgaggttgaagttgaattcttcggtacaatgaaaccatttattctaaaaccaaaaggtgacgactcggtaacgcaattaattttaccaatcagaacttactaaaaataaatataaataaaggatgacgtgattagttaaaacgtcatcctttattttttggcaaaaataattctagattcgtatataaaataaatttgacagcattttaaacagcaaataaaagacgccaattaaatttatgacaaatgtatccaaaatttaataagtgtgcttatatgccctttaaatttaaaattttaatagtcaataacaagttgaatataaaagttaaacgccgttaaatagcgttaaaaaattgaaaatgacagtattgccaaaaaataagaattaattatttatatgtaaacggtttctacctctattttaaatgaaatttgtgacaaaaaaaggtataatatattaatgacatacaaagaaatggagtgattattttggttcaagaagttgtagtagaaggagacattaatttaggtcaatttctaaagacagaagggattattgaatctggtggtcaagcaaaatggttcttgcaagacgttgaagtattaattaatggagtgcgtgaaacacgtcgcggtaaaaagttagaacatcaagatcgtatagatatcccagaattacctgaagatgctggttctttcttaatcattcatcaaggtgaacaatgaagttaaatacactccaattagaaaattatcgtaactatgatgaggttacgttgaaatgtcatcctgacgtgaatatcctcattggagaaaatgcacaaggaaagacaaatttacttgaatcaatttataccttagctttagcaaaaagtcatagaacgagtaatgataaggaactcatacgttttaatgctgattatgctaaaatagaaggtgagcttagttatagacacggcacgatgccattaacaatgtttataactaaaaaaggtaaacaagtcaaagtgaatcacttagagcaaagtcgtctaactcaatatattggacacctcaatgtggttctatttgcgccagaagatttgaatattgtaaaaggctctcctcaaataagacgacgctttatagatatggagttgggccaaatttctgctgtttacttaaatgatttagctcaataccaacgtattttaaagcaaaagaataattacttaaagcagttacaattaggccaaaaaaaggacttaacaatgttggaagtattaaatcagcagtttgctgaatatgcaatgaaagtaactgataaacgtgcacattttattcaagagctagagtcgttagctaaaccgattcatgctggtatcacaaatgataaagaagcgttgtcgctgaattatttacctagtcttaaatttgactatgctcaaaatgaagcggcacgacttgaagaaattatgtctattcttagcgataatatgcaaagagaaaaagaacgaggcattagcttattcggaccacatcgagatgatataagttttgatgtgaatggcatggatgctcaaacatatggttctcaaggacagcaacgtacaacggctttgtccattaaattagctgaaattgagttaatgaatatcgaagttggggaatatcctatcttattattagacgatgtactcagtgaattagatgattcgcgtcaaacgcatttattaagtacgattcagcataaagtacaaacatttgtcactacgacatctgtagatggtattgatcatgaaatcatgaataacgctaaattatatcgtattaatcaaggtgaaattataaagtaacagaaagcgatggtgactgcattgtcagatgtaaacaacacggataattatggtgctgggcaaatacaagtattagaaggtttagaagcagtacgtaaaagaccaggtatgtatataggatcgacttcagagagaggtttgcaccatttagtgtgggaaattgtcgataatagtatcgatgaagcattagctggttatgcaaatcaaattgaagttgttattgaaaaagataactggattaaagtaacggataacggacgtggtatcccagttgatattcaagaaaaaatgggacgtccagctgtcgaagttattttaactgttttacatgctggtggtaaatttggcggtggcggatacaaagtatctggtggtttacatggtgttggttcatcagttgtaaacgcattgtcacaagacttagaagtatatgtacacagaaatgagactatatatcatcaagcatataaaaaaggtgtacctcaatttgacttaaaagaagttggcacaactgataagacaggtactgtcattcgttttaaagcagatggagaaatcttcacagagacaactgtatacaactatgaaacattacagcaacgtattagagagcttgctttcttaaacaaaggaattcaaatcacattaagagatgaacgtgatgaagaaaacgttagagaagactcctatcactatgagggcggtattaaatcttatgttgagttattgaacgaaaataaagaacctattcatgatgagccaatttatattcatcaatctaaagatgatattgaagtagaaattgcgattcaatataactcaggatatgccacaaatcttttaacttacgcaaataacattcatacgtacgaaggtggtacgcatgaagacggatttaaacgtgcattaacgcgtgtcttaaatagttatggtttaagtagtaagattatgaaagaagaaaaagatagactttctggtgaagatacacgtgaaggtatgacagcaattatatctatcaaacatggtgatcctcaattcgaaggtcaaacgaagacaaaattaggtaattctgaagtgcgtcaagttgtagataaattattctcagagcactttgaacgatttttatatgaaaatccacaagtcgcacgtacagtggttgaaaaaggtattatggcggcacgtgcacgtgttgctgcgaaaaaagcgcgtgaagtaacacgtcgtaaatcagcgttagatgtagcaagtcttccaggtaaattagccgattgctctagtaaaagtcctgaagaatgtgagattttcttagtcgaaggggactctgccggggggtctacaaaatctggtcgtgactctagaacgcaggcgattttaccattacgaggtaagatattaaatgttgaaaaagcacgattagatagaattttgaataacaatgaaattcgtcaaatgatcacagcatttggtacaggaatcggtggcgactttgatctagcgaaagcaagatatcacaaaatcgtcattatgactgatgccgatgtggatggagcgcatattagaacattgttattaacattcttctatcgatttatgagaccgttaattgaagcaggctatgtgtatattgcacagccaccgttgtataaactgacacaaggtaaacaaaagtattatgtatacaatgatagggaacttgataaacttaaatctgaattgaatccaacaccaaaatggtctattgcacgatacaaaggtcttggagaaatgaatgcagatcaattatgggaaacaacaatgaaccctgagcaccgtgctcttttacaagtaaaacttgaagatgcgattgaagcggaccaaacatttgaaatgttaatgggtgacgttgtagaaaaccgtagacaatttatagaagataatgcagtttatgcaaacttagacttctaagcgctgtgaactgaacttttgaaggaggaactcttgatggctgaattacctcaatcaagaataaatgaacgaaatattaccagtgaaatgcgtgaatcatttttagattatgcgatgagtgttatcgttgctcgtgcattgccagatgttcgtgacggtttaaaaccagtacatcgtcgtatactatatggattaaatgaacaaggtatgacaccggataaatcatataaaaaatcagcacgtatcgttggtgacgtaatgggtaaatatcaccctcatggtgactcatctatttatgaagcaatggtacgtatggctcaagatttcagttatcgttatccgcttgttgatggccaaggtaactttggttcgatggatggagatggcgcagcagcaatgcgttatactgaagcgcgtatgactaaaatcacacttgaactgttacgtgatattaataaagatacaatagattttatcgataactatgatggtaatgaaagagagccgtcagtcttacctgctcgattccctaacttgttagccaatggtgcatcaggtatcgcggtaggtatggcaacgaatattccaccacataacttaacagaattaatcaatggtgtacttagcttaagtaagaaccctgatatttcaattgctgagttaatggaagatattgaaggtcctgatttcccaactgctggacttattttaggtaagagtggtattagacgcgcatatgaaacaggtcgtggttcaattcaaatgcgttctcgtgcagttattgaagaacgtggaggcggacgtcaacgtattgttgtcactgaaattcctttccaagtgaataaggctcgtatgattgaaaaaattgcagagctcgttcgtgacaagaaaattgacggtatcactgatttacgtgatgaaacaagtttacgtactggtgtgcgtgtcgttattgatgtgcgtaaggatgcaaatgctagtgtcattttaaataacttatacaaacaaacacctcttcaaacatcatttggtgtgaatatgattgcacttgtaaatggtagaccgaagcttattaatttaaaagaagcgttggtacattatttagagcatcaaaagacagttgttagaagacgtacgcaatataacttacgtaaagctaaagatcgtgcccacattttagaaggattacgtatcgcacttgaccatatcgatgaaattatttcaacgattcgtgagtcagatacagataaagttgcaatggaaagcttgcaacaacgcttcaaactttctgaaaaacaagctcaagctattttagacatgcgtttaagacgtctaactggtttagagagagacaaaattgaagctgaatataatgagttattaaattatattagtgaattagaagcaatcttagctgatgaagaagtgttattacagttagttagagatgaattgactgaaattagagatcgtttcggtgatgagcgtcgtacagaaattcaattaggtggatttgaagacttagaggacgaagacttaattccagaagaacaaatagtaattactttgagccataataactacattaaacgtttgccggtatctacatatcgtgctcaaaaccgtggtggtcgtggtgttcaaggtatgaatacattggaagaagattttgtcagtcaattggtaactttaagtacacatgaccatgtattgttctttactaacaaaggtcgtgtatacaaactaaaaggttatgaagtgcctgagttatcaagacagtctaaaggtattcctgtagtgaatgctattgaacttgaaaatgatgaagtcattagtacaatgattgctgttaaagaccttgaaagtgaagacaacttcttagtgtttgcaactaaacgtggtgtcgttaaacgttcagcattaagtaacttctcaagaataaatagaaatggtaagattgcgatttcgttcagagaagatgatgagttaattgcagttcgtttaacaagtggtcaagaagatatcttgattggtacatcacatgcatcattaattcgattccctgaatcaacattacgtcctttaggccgtacagcaacgggtgtgaaaggtattacacttcgggaaggtgacgaagttgtagggcttgatgtagctcatgcaaacagtgttgatgaagtattagtagttactgaaaatggttatggtaaacgtacgccagttaatgactatcgtttatcaaatcgtggtggtaaaggtattaaaacagctacgattactgagcgtaatggtaatgttgtatgtatcactacagtaactggtgaagaagatttaatgattgttactaatgcaggtgtcattattcgactagatgttgcagatatttctcaaaatggtcgtgcagcacaaggtgttcgcttaattcgcttaggcgatgatcaatttgtttcaacggttgctaaagtaaaagaggatgcagacgaagtaaatgaagatgaacaatctactgtatctgaagatggtactgaacaacaacgcgaagcggttgtaaatgatgaaacaccaggaaatgcaattcatactgaagtgattgattcagaagaaagtgatgaagatggacgtattgaagtaagacaagatttcatggatcgtgttgaagaagatatacaacaatcatcagatgaagatgaagaataaaaaataagacttccctatatgtaggggagtcttatttttatgctagaaagtaatgctgtactatattcaatgattagtaatgattaactttctaattgtttcattgcgtaaggtatttcattgataagtcttgatggtggcaccacatacatatcttttgcaagattttcgccaataaaactatgtgtatatgtggcactcataaccgcttcttttaagttatcaaattgaccaacaaaacttgtaatcataccagcaagtgtatcgcccataccaccagtcgccattgctgggctaccgattgttaatttaaagtcttcatctttaaagaaaatttcagtaccatgttttttaagtacaacagttgcgcctaaacgatcaactgcttcacgattacgctcatatgtctgttcctcaataggaataccacttaatcgctcccattctttgagatgcggagtaaaaatcacgcgacatgtaggtaattgcggtttcagtttactaaatattgtaatcgcatcgccgtctacgattaaattttgatgcggttgtatattttgtagtaggaatgtaagggcattatttcctttgaaatcaacgccaagacctggaccaattagtatactgtcagtcatttcaatcattttcgtcaacatttttgtatcattaatatcaataaccatcgcttctgggcaacgagaatgtaatgctgaatgatttgttggatgtgtagctacagtgattaaaccactaccgctaaatacacatgcacgagccgctaacataatggcaccacctaagttagcagatccaccaattaataaaattttgccataatcacctttatgtgaatcttctttacgcttaggaatgttaatagaatttaacgtttccatagtgatataacctcccatgtaaaagccttttccgaatttattcaattttaaaaatatatagtaacttttaacaaaatgtattataaatttctgaattcattattatttgtcgttaaatacaatagaaaatactatacctgtatatgcaattcgtcaatagataaattattaaatatgcttacaacactcttaatatcctttaatgcactacaatagtgctctgataataggttataaatgtacgtaaaaccattgtttcaataaaaatgaaaacgtatacttcaagaaggatgggttacttaatataaacaagggggtaacatatatgactttatatttagatggtgaaacactaacaattgaggatattaaatcatttttacaacaacaatcaaagattgaaattattgatgatgcgttagaacgtgtcaaaaaaagtagagcggtagttgaacgtattattgaaaatgaggaaacggtttacggtatcactacaggttttgggttatttagtgatgtacgtatagacccaacgcaatataatgaattacaagtgaatctgatacgatcacatgcctgtggactaggtgagccattttcaaaagaagtagcattagtcatgataattttacgattgaatacattattaaaaggtcattcaggtgccactttagaattagtgagacaattacaattttttataaatgaacgtattataccgataatcccacaacaaggctctctcggtgcatcaggagatttagcaccattatcacacttagcattagcattaattggtgaagggaaagtattgtacagaggagaagaaaaggatagcgacgatgtattaagagaattaaatagacaacctttgaaccttcaggctaaagaaggtttagcattgattaatggtacgcaagctatgacagctcaaggtgtcattagttatatagaagcagaagatttaggttaccaatctgaatggattgctgcattaacgcatcagtctcttaatggcattatagatgcatatcgacatgatgtgcacgctgttcgtaattttcaagaacagattaatgtggcagcgcgtatgcgtgattggttagaaggatcaacattaacgacgcgacaagcagaaatacgtgtacaagatgcatatacgttgcgttgtataccacaaatccatggcgcgagttttcaagtattcaattatgttaaacagcaattagaatttgaaatgaatgcggctaatgataatccacttatatttgaggaagcaaatgaaacgtttgttatttcaggtggtaacttccatggacaacctattgcttttgcattagatcatcttaaattaggtgtaagtgaattagcaaacgtatcggaacgtcgtttagagcgactagtaaatcctcaattaaatggtgatttaccagcatttcttagtccagagccaggattgcaaagtggcgcgatgattatgcaatatgctgctgcaagtctcgtttctgaaaataaaactttagcgcatccagcgagtgttgattctatcacttcatctgcgaaccaagaagatcacgtatctatgggaactacagctgctagacatggttatcaaattattgaaaatgcaagacgtgtgttggcaatcgaatgtgttattgcattacaagcagcagagttgaaaggtgtcgaaggattatcaccaaaaacacgtctcaagtatgatgagtttcgaagtatcgtgccatccattacacatgaccgtcaatttcataaagatattgaagcggttgcacagtatttaaagcaatcaatttatcaaacgactgcatgtcactaaatcgacatgagtgatgtttgaaatcgttacttgaaaaagcaaatatagtttgctatattaaaaataacttaataagacattgttcgtaggacaagtaatatatagtgttcgatatcagagagcttgtggttagtgtgaacaagaatcaacatatatatgaatctacctacttaatttaaaagaacaatcggtgataaccgttattttagtgaagtgcaatttaggtttagtgtatctttataacttaaattgttaaatagggtggcaacgcgtagaccacgtcccttgtagggatgtggtctttttttattttctaaaaaataaagacgtacgtcattccataataaatgataattatttgggaaaggatgaaggttaatgttagacattagattattcagaaatgagcctgacacagttaagagcaaaattgaattacgtggagatgatccaaaagttgtagatgaaattttagaattggatgagcaacgacgtaaattaattagtgcaacagaagaaatgaaagcacgtcgtaataaagtaagcgaagaaatcgcattaaaaaaacgtaataaagaaaatgctgatgatgtgattgctgaaatgcgcacattaggtgacaatattaaagaaaaagatagtcaattaaatgaaattgataataaaatgacaggtatcctttgtcgtattccaaatttaataagtgatgatgtacctcaaggtgaatctgatgaagataacgttgaagttaaaaagtggggtacaccacgtgagttttcatttgaaccaaaagcacattgggatattgtagaagaattgaaaatggctgattttgatcgtgcagcaaaagtttcaggtgcgcgttttgtatatttaacaaatgaaggtgcgcaattagagcgtgctttaatgaactatatgattacaaaacatacaacacaacatggttatacagaaatgatggtaccacagcttgtgaacgcagatacaatgtatggtacaggtcaattacctaaatttgaagaagatttatttaaagtagaaaaagaaggattatatacaattccaactgctgaagtaccattaacgaatttctaccgtaatgaaattattcaaccaggtgtacttcctgaaaaattcactggtcaatctgcatgtttccgtagtgaagcaggatcagcaggtagagatacaagaggattaattcgtttacatcaattcgataaagtggaaatggtacgttttgaacaacctgaagattcatggaatgctttagaagaaatgacaacaaacgcagaagcaattctagaagagttaggtttaccataccgtcgtgttattttatgtacaggtgatattggatttagtgcaagcaaaacatatgatttagaagtttggttaccaagctacaatgattataaagaaattagttcatgctcaaactgtacggatttccaagcgcgtcgtgctaacatccgcttcaagcgtgacaaagcagctaaaccagaattagcacatacattaaatggtagtggtttagcagttggacgtacatttgctgctattgttgaaaattaccaaaatgaagatggaacagtaacaattccagaagcattagtaccatttatgggtggtaaaactcaaatttcaaaaccagttaaataaaggctttagctacaaactttaaaaagtatatatctacgtatacttaaagcaagggcaagatactttaaataatattttaaaaagtggtgacgaagctgtcgccactttttttgtgctgtaaaagtataatagtgagccaatacacataacaacaataaattaagtttgtggttcaatggggtgaacgcatttcattatagcaacaatacgggataattatgatggactaaaacaatctaaaacgtaacaagtttgagcatcaatattataggaaattaagcgataaataactgatttcgttgatgtagtatgagtaatatcgatgcagtagggtaggggggatgatgattataagggatcgggacacgaatcaatatcccagactcatcattagatataaaaaattataaaattagtacttaaaaacaaacacctaatctacagaaaatatggaggtagtcttaaataaaaaaatgaaaattctaaaaaataaaaagttaatatgaagctggttaaagactccggtatgtctaacctcagacaaactaccgtctaatgttattgcttagggtatagaactgtattagactaggtatattattttttcgtaattatataaatataaagtggcaaaggaggtagttgagatgacaacacatttaagttttagacaaggcgtgcaagagtgtatccctacattattaggttatgccggtgttggtatttcatttggtattgtggcttcgtctcaaaactttagtattttagaaattatcttgttatgtcttgttatatatgccggtgctgcgcaatttattatgtgcgcattgtttatagcaggtacaccgatatcagcgattgtactaactgtatttatcgtaaattcaagaatgttccttttaagtatgtcgcttgcaccaaacttcaagacatatgggttttggaaccgtgttggattaggttcattagtaactgacgaaacgtttggtgtcgccattacaccttatttaaaaggagaagctatcaatgatcgctggatgcatgggcttaatattacagcatatttattttgggcaatttcatgtgtagcaggtgcattgtttggcgagtatatttcgaatccacaagcattagggttagattttgctatcacggctatgtttatctttttggccattgcgcaatttgaatcaattactaaatcgcgattaagaatttacatagtactcattattgccgtcatagtaatgatgttatcgctaagtatgtttatgccttcatatctagcaatattaattgcagccacaatttcagcagcgttaggagtgatgatggaacgatgataactcatatgaacatgttaatacttattttattgtgtggtatcgtaacactattaattcgaattataccttttatcatgatttcaaaagtgcaattgcctgatgtcgtggttcgatggctatcatttatcccaatcacactatttacggcacttgtcattgacagcattattcaacagacgcctcatggtgaggggtatacattaaacatcccttacgttatcgcgctcattccgacggttattttatctataatcacgcgtagtttaactattacaattattagtgggattgttatcatggcagcattacgatttttcttttaaaaataactgaaaatcattgaacagatatttaaacttaggtaaactgttagtaatcagaaaattctgatatacaaatcgtctatgttaagattgggaatcgtgtatacgtaagcgatttggctaacgcatgacaatgataacaacattttaaatgataaaagtaattcatcactgaatctcaactaacacataacaatttcatatttcttattgtgagaagttgagggacttggccctgtgatacttcagcaaccgactttatagcacggtgctaaaaccaacgagttactcgaatgataagtataaagacttcttacttttcaatagggtgagaagtttttttgtttaaggaggaaagaacaatgacaaattacacagtagatactttaaatctagggaaatttattacagaatctggggaagtcatagataacttgcgtttgagatatgagcatgtcggttatcatggacaaccattagttgtagtttgtcatgcattaactggcaatcatttaacatatggaacagatgattatccgggttggtggcgagaaattattgatgggggatatatacccattcacgattatcaatttttaacatttgatgttattggtagtcctttcggttcaagttcacctttaaacgaccctcattttcctaaaaaattaacattaagagatattgttagagcgaatgaacgaggtatacaagcgcttggttatgacaaaattaatattttaatagggggaagtcttggaggtatgcaagcaatggaactactttacaatcaacagtttgaagtagataaagccattatccttgctgcaacaagccgaacatcatcttatagtagagcttttaatgaaattgcgcgtcaggccattcatcttggtggtaaggaaggactaagtattgcacgccaattaggttttttgacatatcgatcatcaaaaagttatgatgaacgtttcacgccggatgaagtagtcgcatatcaacaacatcaaggtaataaatttaaagaacattttgatttgaattgttatctgacactgctagatgtattggatagtcacaacattgaccgaggtcgcacagatgtaacgcatgtttttaaaaatttagaaacgaaagtcttaacgatgggattcatagatgatttgctatatccggacgatcaagttcgtactttaggtgaacgttttaaatatcatcgtcatttctttgtacctgataacgttggccatgacggattcttattaaactttaatacatgggcacctaacttatatcattttttgaatttaaagcattttaagcgcaagtaataatgtatatattttcaaagaatgaagccactaaatcatagttatcatattcaaaaacatctagagtacatgaaagtggaaatgaattgtaaatctaaatcaagcttgattgctatgtagtgggattaaataatcatgttgaaaatgaaagcacacaaaagcgattcaaatgagtatgttaattacttataaaacatgaaagttattattcaattaaatgaaatagaagcatacaatctataaattgttaatttccattaaagaggttaaaataatagctatagttaaaaatatgggagtggcttatgtgttttcaaaaatacaacctaaagcaacaataattgcaacgattgcgttggtatttgtcgctttagctttatatctagtgcctggtttaggactaatatttgcattatttgcaaccataccaggtatcgttttatggaataaatcaatacaatctttcgggattagtgcacttattacagtaattataacaactgttttaggtaatactttcgttttaagtgctatcatattagtcttaattgcaagtttaattattggtcaattgcttaaagaaaaaacgtctaaagaaagaatattgtacgtaacaacagtagcgatgagcttaatttcattaatcgcttttatgttactacaaacatttggaagaattccaccatcagcgagcatagtaaaacctttcaagcaaacattacatgaagcgattacgatgagcggtgccgatgcgaatatgacccaaatattagaagaagggtttagacaagcgaccgttcaattaccaggtttcatcattatcattacatttttaatcgtcttaattaacttaatcgttacatttccgattttacgaaaatttaaaatcgctacacctgtatttaagccacttttcgcgtggcaaatgagcggtattttgttatggatatacattattgttatcatatgtttattatttacaggtcaaccgagtgtgttccagagcattcttttaaacttccaacttgtgttatcattagtgatgtatattcaaggtttaagtgttattcatttctttggtaaagcgaaaggtttgccgaatgcagtaacgattttactattgattatcggtacaatactgacacctacgacgcatattgtaggactacttggtgttatcgatttaagtttgaatttgaagcgaatcatgaaaaataattctaaaaagtgaatagaggtggaataatgaatcggcagtccactaagaaagctttactaataccatttgtcatcatgatcatcacagcaattgttttaatgggtgtatggtttatctttaatagtcttatagcactaattgcatctatcgttcttgtcgtgatgattattgttagcatcgttttattcagacaagctttaatgaaaatggatagttatgtagatggtttgagtgctcaaatttcaacaacaaataataaagcaatcaaacatttaccaattggtatcattgttttagatgaaaatgatcacatcgaatgggttaaccaatttatgacagatcatatggaagcaaatgtcatttctgaatctgtaaatgaagtatttccaaacattttaaagcaattagatagagtgaaatccgttgaaatagaatataatcagtatcatttccaagtacgttattctgagaatgatcactgcctctatttctttgatataactgaacaagtacaaacaaatgaactatatgaaaattctaaaccaatcattgcgacattatttttagataactacgatgagattactcaaaatatgaatgatacgcagcgttcggaaatcaattcaatggtaacgcgtgttattagtcgatgggcaactgagtataatatattctttaaaaggtatagttccgatcaattcgtagcctatttaaatcaaaaaatattagctgacttagaagaatctaaatttgatatcttgagtcaattacgtgaaaaaagtgttggttatcgtgcccaattaacattaagtatcggtgttggtgaaggcactgaaaatttaatcgatttaggtgaattatcacaatcaggcctagacttagcattaggacgcggtggcgaccaagttgcaattaaaagtattaatgggaatgtgcgcttctatggcggtaagactgacccgatggagaaacgtactcgtgtaagagcgcgtgttatctcacatgcattaaaagatatccttgcagagggtgacaaagtcattatcatgggacataaacgtcctgacttagatgcaattggtgcagcaatcggtgtgtctagatttgcaatgatgaataatttagaagcatacatcgtattaaatgaaactgacattgatccaacattacgacgcgtgatgaacgaaattgataaaaagccagagttaagagagcgatttattacatcagatgatgcttgggatatgatgacatctaagacaaccgtagtgattgttgatacgcataaaccggaactggttttagatgaaaatatcttaaataaagcaaaccgtaaagttgttatcgatcatcatagacgtggtgaaagcttcatctctaatccattgttggtatatatggaaccatatgcaagttcgacagctgaattggtaacagagttactggaatatcaaccaacagaacaacgtttaacacgtcttgaatcaacagtgatgtatgcaggtattattgtagatacaagaaactttacattacgaacaggatcaagaacattcgatgcagcgagttatttacgtgcacatggtgcagatacgattttaacgcaacatttcttaaaagatgatgtggatacttacattaatcgatctgaattaattcgaactgtaaaagtcgaagatagtggcatagccattgcgcatggttcagaagataaaatttatcatccagtaacagttgcacaagcagcagatgaactgttaagtttagaaggtattgaagcatcatatgttgttgcgagacgtgaagataatctaattggtatatctgcacgttcactcggttcagtaaatgtccagttaacaatggaagcacttggtggcggtggacatttaaccaatgctgcaacacaacttaaaggtgtgacagtcgaagaggcgatagcacaattacaacaagcaattacagaacaattaagtaggagtgaagatgcatgaaagtaatttttacacaagatgttaaaggtaaaggtaaaaaaggtgaagttaaagaagtaccagtaggttatgcaaataacttcttattgaaaaagaattatgctgtagaagcaacaccaggtaaccttaaacaattagagttacagaaaaaacgtgcaaaacaagaacgccaacaagaagttgaagatgctaaagcattaaaagaaactttatcaaacattgaagttgaagtatcagcaaaaactggtgaaggtggtaaattgtttggatcagtaagtacaaaacaaattgccgaagcactaaaagcacaacatgatattaaaattgataaacgtaaaatggatttaccaaatggaattcattccctaggatatacgaatgtacctgttaaattagataaagaagttgaaggtacaattcgcgtacacacagttgaacaataaagttggattgaaataagaggtgtaaccattcatggatagaatgtatgagcaaaatcaaatgccacataacaatgaagctgaacagtctgtcttaggttcaattattatagatccagaattgattaatactactcaggaagtgttgcttcctgagtcgttttataggggtgcccatcaacatattttccgtgcaatgatgcacttaaatgaagataataaagaaattgatgttgtaacattgatggatcaattatcgacggaaggtacgttgaatgaagcgggtggtccgcaatatcttgcggagttatctacaaatgtaccaacgacgcgaaatgttcagtattatactgatatcgtttctaagcatgcattaaaacgtagattgattcaaactgcagatagtattgccaatgatggatataatgatgaacttgaactagatgctattttaagtgatgcagagcgtcgaattttagagctatcatcttctcgtgaaagcgatggctttaaagacattcgagacgtcttaggacaagtgtatgaaacagctgaagagcttgatcaaaatagtggtcaaacaccaggtattcctacaggatatcgagatttagaccaaatgacagcagggttcaaccgaaatgatttaattatccttgcagcgcgtccatctgtaggtaagactgcgttcgcacttaatattgcacaaaaagttgcaacgcatgaagatatgtatacagttggtattttctcactagagatgggtgctgatcagttagccacacgtatgatttgtagttctggtaatgttgactcaaaccgcttaagaacgggtactatgactgaggaagattggagtcgttttactatagcggtaggtaaattatcacgtacgaagatttttattgatgatacaccgggtattcgaattaatgatctacgttctaaatgtcgtcgattaaagcaagaacatggcttagacatgattgtgattgactacttacagttgattcaaggtagtggttcacgtgcgtccgataacagacaacaggaagtttctgaaatctctcgtacattaaaagcattagcccgtgaattagaatgtccagttatcgcattaagtcagttatctcgtggtgttgaacaacgacaagataaacgtccaatgatgagtgatattcgtgaatctggttctattgagcaagatgccgatatcgttgcattcttataccgtgatgattactataaccgtggcggcgatgaagatgatgacgatgatggtggttttgagccacaaacaaatgatgaaaacggtgaaattgaaatcatcattgctaagcaacgtaatggtccaacaggcacagttaagttacactttatgaaacaatataataaatttacagatatcgattatgcacatgcagatatgatgtgaaaaaagtttttccgtacaataatcatcgtgatgataaaattgtacggtttttattttgttctgaacgggttgatatatgttaagtttgtgtattggaagtgatgaattagtgccggaaacacctatgttaaagggtttttagcacgttgaagacgatttgtaaaaatgatttttcttttaaaaaggccgaaaatcaatgttcgatttttatttgcattatggtctcgatattggtagaatatcaaatggttaaatgagaaaaacttggaggtgctcacatgtcatcaatcgtagtagttgggacacaatggggagacgaaggaaaaggaaaaataacggatttcttggcagaacagtcagatgttatcgcgcgtttttcaggtggtaataatgcaggccataccattcaatttggcggagaaacatataaattacatttagtaccatctggtatcttttacaaagacaaattagcggtaatcggtaacggagtcgttgttgatccagttgcactattgaaagaattagacggattaaatgaacgtggcattcctacaagtaatttacgtatatctaatcgtgcgcaagtgattttaccatatcacttagcacaagatgaatatgaagaacgtttacgtggtgacaataagattggtacaactaaaaaaggtatcggtccagcatatgtagacaaagttcaacgtatcggtattcgtatggcagatttacttgaaaaagaaacattcgaaagattattaaaatcaaacattgaatataaacaagcatatttcaaaggtatgtttaacgaaacatgtccatcatttgatgatatctttgaagaatattatgcagcaggtcaacgtctaaaagaatttgtaacagacacatcaaaaatcttagacgatgcatttgtagcagatgaaaaggtacttttcgaaggtgcgcaaggtgtaatgttagatatcgaccatggtacatatccatttgttacatcaagtaatccaattgcaggtaacgttactgttggtacaggtgtaggtcctacattcgtttcaaaggtaattggtgtatgtaaagcttatacatcacgtgttggtgatggtccattccctactgaattattcgatgaagatggacatcatattagagaagttggtcgtgaatacggtacaacaacaggacgtccacgtcgtgtaggttggtttgattctgttgtattacgtcactctcgtcgtgtaagtggtattacagatttatctattaactcaatcgatgttttaacaggcctagacacagtgaaaatctgtacagcttatgaattagacggtaaagaaattactgagtacccagcaaacttagatcaattaaaacgttgtaaaccaatctttgaagagttaccaggttggacagaagacgtaacaagtgtgcgtactttagaagaattacctgaaaatgcacgtaaatatttagagcgtatttcagaattatgtaatgtacaaatttctatcttctcagttggtccagatagagaacaaacaaacctattaaaagaattgtggtagaactttatataagtcatacacaatgattataaatacatgagccttctatctttattggtaggaggcttttgctatgtttgcttctgtatcgattcgattatttagataaaaattattaacgtaaaggtggtatttgctagtcataatttaaaagattagatgatatttaacgaaaattaagatgaaatacttgaatgtaataagtctgatgtcgaaaatagctattaaaatagagtagacgtaagtataaatgaaagcatctaaaatagaaaaatttcaaaaatagcgtaattattacaataaatagactgccaataaaatgcaatttttcacttataacattcttcaaaaaataatagcaaaattatgtaaaaaatatcttgtcatggcaagattggctgtgctataatctatcttgtgcttaagaacggctccttggtcaagcggttaagacaccgccctttcacggcggtaacacgggttcgagtcccgtaggagtcaccattttttaggtctcgtagtgtagcggttaacacgcctgcctgtcacgcaggagatcgcgggttcgattcccgtcgagaccgtacaaatgcctatccaagaggataggcatttttttgcgtttaatattatattaataaaagacatatggacgaatgataatcatattgatttatctgttcgtccattttctttataatgtatgaacctcgagtaacttagtggttggatatgaaagataaacgtagacaataaaatctttattagacgtacaaatatatgctactgtcaacatatttcttcgttgtgatatgccaccaatcctccataacatcaattgttaaaataacgaataatgatatttattttctgggcaatgacgtgcaactagaagttgccattaccctaattttattattggaatagagccctcatcattgtgttaaatatcattatcacaatccgccgtgagaaactaataaaaaatattaatatataagtttatattggaaaatagaattaatagcttataaatggtaaattatataataggttactatacgttatgagacggaaaatgcgcacaataacaaaaatagtaagcgacatcctgtgattttttacacaaacataaacgataaagaacaaaaaatgataaaataatattaatgatttaagaaaagaggtttatgcaaatggctagaaaagttgttgtagttgatgatgaaaaaccgattgctgatattttagaatttaacttaaaaaaagaaggatacgatgtgtactgtgcatacgatggtaatgatgcagtcgacttaatttatgaagaagaaccagacatcgtattattagatatcatgttacctggtcgtgatggtatggaagtatgtcgtgaagtgcgcaaaaaatacgaaatgccaattataatgcttactgctaaagattcagaaattgataaagtgcttggtttagaactaggtgcagatgactatgtaacgaaaccgtttagtacgcgtgaattaatcgcacgtgtgaaagcgaacttacgtcgtcattactcacaaccagcacaagacactggaaatgtaacgaatgaaatcacaattaaagatattgtgatttatccagacgcatattctattaaaaaacgtggcgaagatattgaattaacacatcgtgaatttgaattgttccattatttatcaaaacatatgggacaagtaatgacacgtgaacatttattacaaacagtatggggctatgattactttggcgacgtacgtacggtcgatgtaacgattcgtcgtttacgtgaaaagattgaagatgatccgtcacatcctgaatatattgtgacgcgtagaggcgttggatatttcctccaacaacatgagtagaggtcgaaacgaatgaagtggctaaaacaactacaatcccttcatactaaacttgtaattgtttatgtattactgattatcattggtatgcaaattatcgggctgtattttacaaataaccttgaaaaagagctgcttgataattttaagaagaatatcacgcagtacgctaaacaattagaaattagtattgaaaaagtatatgacgaaaagggctccgtaaatgcacaaaaagatattcaaaatttattaagtgagtatgccaaccgtcaagaaattggagaaattcgttttatagataaagaccaaattattattgcgacgacgaagcagtctaaccgtagtctaatcaatcaaaaagcgaatgacagttctgtccaaaaagcactatcactaggacaatcaaacgatcatttaatattaaaagattatggcggtggtaaggaccgtgtctgggtatataatatcccagttaaagtcgataaaaaggtaattggtaatatttatatcgaatcaaaaattaatgacgtttataaccaattaaataatataaatcaaatattcattgttggtacagctatttcattattaatcacagtcatcctaggattctttatagcgcgaacgattaccaaaccaatcaccgatatgcgtaaccagacggtcgaaatgtccagaggtaactatacgcaacgtgtgaagatttatggtaatgatgaaattggcgaattagctttagcatttaataacttgtctaaacgtgtacaagaagcgcaggctaatactgaaagtgagaaacgtagactggactcagttatcacccatatgagtgatggtattattgcaacagaccgtcgtggacgtattcgtatcgtcaatgatatggcacttaagatgcttggtatggcgaaagaagacatcatcggatattacatgttaagtgtattaagtcttgaagatgaatttaaactggaagaaattcaagagaataatgatagtttcttattagatttaaatgaagaagaaggtctaatcgcacgtgttaactttagtacgattgtgcaggaaacaggatttgtaactggttatatcgctgtgttacatgacgttactgaacaacaacaagttgaacgtgagcgtcgtgaatttgttgccaatgtatcacatgagttacgtacacctttaacttctatgaatagttacattgaagcacttgaagaaggtgcatggaaagatgaggaacttgcgccacaatttttatctgttacccgtgaagaaacagaacgaatgattcgactggtcaatgacttgctacagttatctaaaatggataatgagtctgatcaaatcaataaagaaattatcgactttaacatgttcattaataaaattattaatcgacatgaaatgtctgcgaaagatacaacatttattcgagatattccgaaaaagacgattttcacagaatttgatcctgataaaatgacgcaagtatttgataatgtcattacaaatgcgatgaaatattctagaggcgataaacgtgtcgagttccacgtgaaacaaaatccactttataatcgaatgacgattcgtattaaagataatggcatcggtattcctatcaataaagtcgataagatattcgaccgattctatcgtgtagataaggcacgtacgcgtaaaatgggtggtactggattaggactagccatttcgaaagagattgtggaagctcacaatggtcgtatttgggcaaacagtgtagaaggtcaaggtacatctatctttatcacacttccatgtgaagtcattgaagacggtgattgggatgaataataaggaacatattaaatctgtcattttagcactactcgtcttgatgagtgtcgtattgacatatatggtatggaacttttctcctgatattgcaaatgtcgacaatacagatagtaagaagagtgaaacgaaacctttaacgacacctatgacagccaaaatggatacaactattacgccatttcagattattcattcgaaaaatgatcatccagaaggtacgatcgcgacggtatctaatgtgaataagctgacgaaacctttgaaaaataaagaagtgaagtccgtggaacatgttcgtcgtgatcataacttgatgattccggatttaagcagtgattttacattatttgattttacgtatgatttaccgttatcaacatatcttggccaagtactgaacatgaatgcgaaagtaccaaatcatttcaatttcaatcgtttggtcatagatcatgatgctgatgataatatcgtgctttatgctataagcaaagatcgccacgattacgtaaaattaacaactacaacgaaaaatgatcattttttagatgcattagcagcagtgaaaaaagatatgcaaccatacacagatatcatcacaaacaaagatacaattgatcgtacgacgcatgtttttgcaccaagtaaacctgaaaagttaaaaacatatcgcatggtatttaacacgattagtgttgagaaaatgaatgctatactatttgacgattcaaccatcgttcgtagttcaaagagtggtgttacaacctacaacaataatacaggtgtcgcaaactataacgataaaaatgaaaaataccactataaaaacttgtccgaagatgaagcaagttccagcaaaatggaagaaacgattccaggaacctttgattttattaatggtcatggtggtttcttaaacgaagatttcagattgtttagtacgaataatcagtcaggtgagctaacatatcaacgtttccttaatggttatccaacgtttaataaagaaggctctaatcaaattcaagtcacttggggtgaaaaaggcgtctttgattatcgtcgttcgttattgcgcaccgacgttgttttaaatagtgaggataataaaacattgccgaaattagagtctgtacgttcaagcttagcgaacaatagtgatattaattttgaaaaagtaacaaacatcgctatcggttacgaaatgcaggataactcagatcataatcacattgaagtgcagattaacagtgaactcgtaccgcgttggtatgtagaatatgatggcgaatggtatgtttataacgatgggaggcttgaataaatgaactggaaacttacaaagacacttttcattttcgtgtttattcttgtcaacatcgtgttagtatcgatttatgttaataaagtcaatcgctcacacattaatgaggttgagagtaacaatgaagttaattttcagcaagaagaaattaaagtaccggctagtatattgaataaatcagttaaaggtataaaattagagcaaattacggggcgttcaaaagactttagttctaaagctaagggcgattcggatttgaccgcagcagacggtggaaaattattgaatgcgaacattagtcaatcggtaaaggtcagtgacaataacttaaaagatttgaaagattatgttaacaaacgtgtgttcaaaggttcagaatatcaattaagtgaaattagttctggttctgtaaaatacgaacaaacgtatgataatttcccgattttgaacaatagtaaagcgatgttgaactttaatatagaagataacaaagcggctagttataaacaatcaatgatggatgacattaagcccacagatggtgctgataaaaagcatcaagtgattggtgtgagaaaagcaatcgaggcattatattataatcgttacttgaaaaaaggtgatgaagtcattaatgctagactcggttactactcagtcgtgaacgaaacgaatgttcaattgttacaaccaaactgggaaattaaagtgaagcatgacggtaaggataaaacgaatacttactatgtcgaagcgacaaataataaccctaaaattattaatcattaatatgaatcgtaataagctagcattgcaagctcatcatatgtgagaagcggtgctagctttttgctggtacggtttattatggctgacgtttctgtgtctacaacgtgcgcatttattcatatattaagtagaaccgcattgtaaaattagtgtaactgttattttaaaaactttagtatttgcctaatcattgttataataattaggacattcattgcacgtgattatcaaaatttaattataagagaccggtcgatgaactaaagttacataataggaaaggtatacaaaacagctaatatactgatagtttctgtagggaaaatcgtatatttgcactgatgtatattgcagtcatatagagagattgactgcttaaatagaaaggatgagccgcttgatacgcatgagtgtattagcaagtggtagtacaggtaacgccacttttgtagaaaatgaaaaaggtagtctattagttgatgttggtttgactggcaagaaaatggaggaattgtttagtcaaattgaccgtaatattcaagatttaaatggtattttagtaacccatgaacatattgatcatattaaaggattaggtgttttggcgcgtaaatatcaattgccaatttatgcgaatgaaaagacttggcaggcaattgaaaagaaagatagtcgcatccctatggatcagaaattcatttttaatccttatgaaacgaaatctattgcaggtttcgatattgaatcgtttaatgtgtcacatgatgcaatagatccgcaattttatattttccataataactataagaagtttacgattttgacggatacgggttacgtgtctgatcgtatgaaaggtatgatacgtggcagcgatgcgtttatttttgagagtaatcatgacgtcgatatgttgagaatgtgtcgttatccatggaagacgaaacaacgtattttaggtgatatgggtcacgtatctaatgaggatgcgggtcatgcgatgacagacgtgattacaggtaacacgaaacgtatttacttatcgcatttatcacaagataataacatgaaagatttggcgcgtatgagtgttggtcaagtattgaacgaacacgatattgatacggaaaaagaagtattgctatgtgatacggataaagctattccaacgccaatatatacaatataaatgagagtcacccgataaagttccgcactgctgtgaaacgactttatcgggtttttgtttatgttgttggtgggaaatggttgttgttgagattaaggttctagttgaaacgcaaaaaataattcgatattaaatgtaatttataaataatttacataaaatcaatcattttaatataaggattatgataatatattggtgtatgacagttaatggagggaacgaaatgaaagctttattacctaaaacaagtgtatggctcgttttgctttttagtgcaatgggattatggcatgtctcgagcgcggctgagcagcatacaccaatgaaagcatatgcagtaacaacgatagacaaagcaacaacagataagcaacaagtaacgccaacaaaggaagcggctcatcattatggtgaagaagcggcaaccaacgtatcagcgcagggaacagctgatgaaataaacaataaagtaacatccaacgcattttctaacaaaccatctacagcagtttcaacaaaaggaagcgaaacgcgcgacgtagatgtacaacaagcctcaacacaaaaaccaactcatacagcaacattcacattatcaaatgctgaaacagcatcactttcaccacgaatgtttgctgctagtgcaccacaaacaacgacacataaaatattacatacaaatgatatccatggccgactagccgaagaaaaagggcgtgtcatcggtatggctaaattaaaaacagtaaaagaacaagaaaagcctgatttaatgttagacgcaggagacgccttccaaggtttaccactttcaaaccagtcaaaaggtgaagaaatggctaaagcaatgaatgcagtaggttatgatgctatggcagtcggtaaccacgaatttgactttggatacgatcagttgaaaaagttagagggtatgttagacttcccgatgctaagtactaacgtttacaaagatgggaaacgcgcgtttaagccttcaacaattataacgaaaaatggtattcgttatggaattattggcgtaacgacaccagaaacaaagacgaaaacaagacctgaaggcattaaaggtgttgaatttagagatccattacaaagtgtgacagcagaaatgatgcgtatttataaagacgtagatacatttgttgttatatcacatttagggattgatccatcaacacaagaaacatggcgtggtgattacttagtgaaacaattaagtcaaaatccacaattgaagaaacgtattacagttattgatggtcattcacataccgtacttcaaaatggtcaaatttataacaatgatgcattagcacaaacaggtacagcacttgcgaatatcggtaagattacatttaattaccgcaatggagaggtatcaaatattaaaccatcattgattaatgttaaagacgttgaaaatgtgacaccgaacaaagcattagctgaacaaattaatcaagctgatcaaacatttagagcacaaactgcagaggtaattattccaaacaataccattgatttcaaaggagaaagagatgacgttagaacgcgtgaaacaaatttaggaaacgcgattgcagatgctatggaagcatatggcgttaagaatttctcaaaaaagattgactttgccgtgacaaatggtggaggtattcgtgcctctatcgcaaaaggtaaggtgacacgctatgatttaatctcagtattaccatttggaaatacgattgcgcaaattgatgtaaaaggttcagacgtctggacggcttttgaacatagtttaggcgcaccaacaacacaaaaagatggtaagacagtattaacagcgaatggtggtttactacatatctctgattcaatccgtgtttactatgatatgaataaaccgtctggcaaacgaattaacgctattcaaattttaaataaagagacaggtaagtttgaaaatattgatttaaaacgtgtatatcacgtaacgatgaatgacttcacagcatcaggtggcgacggatatagtatgttcggtggccctagagaagaaggtatttcattagatcaagtactagcaagttatttaaaaacagctaacttagctaagtatgatacgacagaaccacaacgtatgttattaggtaaaccagcagtaagtgaacaaccagctaaaggacaacaaggtagcaaaggtagtgagtctggtaaagatacacaaccaattggtaaagacaaagtgatgaatccagcgaaacaaccggcgccaagtaaagttgtgttgttgccagcgcatagaggaactgttagtagtgatagagaaggttctgatcgcgcattggaaggaactactgtatcaagtaagagtgggaaacaattggctagcatgtcagcgcctaaaggtagcgcacatgagaaacagttaccaaaaactggaaatgatcaaagttcaagcccagcagcgatgtttgtattaataacaggtataggtttaatcgcgactgtacgacgtagaaaagctagctaaaatatattgaaaacaatactactgtatttcttaaataagaggtacggtagtgtttttttatggaaaaaagctataaccgttgataaatatgggatataaaaacggggataagtaataagacatcaaggtatttatccacagaaatggggatagttatccagaattgtgtacaatttaaagagaaatacccacaatgcccacagagttatccacaaatacacaagttatacactaaaaatcgggtataaatgtcaggaaaatatcaaaaactgcaaaaaatattggtataataagagggaacagtgtgaacaagttaataacttgtggataactggaaagttgataacaatttggaggaccaaacgacatgaaaatcaccattttagctgtagggaaactaaaagagaaatattggaagcaagccatagcagaatatgaaaaacgtttaggcccatacaccaagatagacatcatagaagttccagacgaaaaagcaccagaaaatatgagcgacaaagaaattgagcaagtaaaagaaaaagaaggccaacgaatactagccaaaattaaaccacaatccacagtcattacattagaaatacaaggaaagatgctatcttccgaaggattggcccaagagttgaaccaacgcatgacccaagggcaaagcgactttgtattcgtcattggcggatcaaacggcctacacaaggacgtcttacaacgcagtaactacgcactatcattcagcaaaatgacatttccacatcaaatgatgcgggttgtgttaattgaacaagtgtatagagcgtttaagattatgcgtggagaggcgtatcataagtagggggataagaaagagatgacttaaatgttttataactcattttatgtaaaatatcgacaacaaataaccatcactaataaatgtaaaggagggaatttatggtaagagaaaatggtggagcaaatgctcaaagaggatttaactatcaaaattgtgtaatttctttagtagcaattagaaattataagaaaccaaatttcaaaatttatgttgaagcagatgaagatttcgaagtaaattatggcgatgattatcatgcatgtatacaagttaaaggagaaaaaaatttaacctttaacaagcttttaaaaggtgaaaacgggaagctttcaatatttgaaaaaaatctttcatctgggaaatcagattctgtatataaaatagttgtttttagctttagccgaaaagatatggaaagcatgcaggaacaaacagatgaagaagaactgttttcaaactcttggttactatcaaatgaccaaaaaaataaagtgaataatgatcgtgttgaaaatttttcattggtaaaaacagcatttgataacgatatgaagaatgctaggatatatttaaagggagaattagtacaacaaaatatagttgttgagggtagagccgaagtaatacttaatgaattatttcaacaaattcttcaaaagtctgaaaaaaaaagttcaaactgaacaagataaagaactgaaaaaaataacgtcaaaagaattagatttgattttacagaaaataactgcaaaagctcgttttgaaaaagaattaaaaaatttaagatttaattcgttgaaagaagagaaaattaaaaaggaagagaagaaaataattttagaatacatggctgtaaaaaaagctgttataagatttttgaaatctgatgaagaaaagttggaaaatagttccattaatacattaatatctgaaacatttaatttgtcagaaatgaattgtttatcagagaatactaaatatgccattgctatatcggcttattgcgatattttagaggagattgcatatgaataaattaacaataacaagtttatcgatacttgataataaagaaaaaaaagcgaataagttcgaattttcagaaaaatctaatttgataattagcgaaaggaacggggaagggaaatctagccttataaaatcaatacagtattgtttaggatcaaatttaaaagcgtttccaaaaggatgggactacaaaaattatgtttttcaattagaaatagttattgataaaaataagatattgattcagagatataataatataataacagttttagatgatgggaaaattaaaaagtttggatacttaaaagactattctgattggtttcaagataagatggagatgaatttaaaattagttagtaagaataaaaatacttctagtttagcttcactggaagctattttgagcccattgtatattgatcaagataaatcatgggatggaaatctatataagaactcatttgagggtttagcacaatataaaagtcaaagttttcctaaagaagtatttgaatactatttaggtatttctaataatataatgaatgataaaataaataaactcaataaatataaagagaaatcggaagaaaaaaaagtaaaaattgaacaagtagattctgtatataaaaattatagttctcaaaagaacatttcgaaaacgataccaaaagaatttgaagagtttaaaaaacaagtagatttctatattaaagaaacagatcgattttctcaaatgatcactcaaaaaacagacaagttatctaaagaaaaaatgaagcttgatattttacaacaagacagggaagaattgagaaaattattaacaaaaacaaaaaaaagattatcagaagtaagttatgaatgtacttattgtcattcagtactaacaagaggccaatctttaacaaggatggaattagatgataataagatagaaatattattacgaaaagatagtataaatcaagaaataataaaaatagaaaaaatattcaaaagaaattaatagaaattcaaaatcttgagaatcaatttgaactttatcatgaacgtctttcagaattaaagcaattatcgaatattgataattatgtaaatcaaaaagtattacaagaattagaaacattaaaaattgaagaagttattgaattgaaagaaatagatcaggaaataaaaagcttgagaaatgaaatttcaaagattaaaaagagtttaaaaactgatttaaaaaatattaatcaaaaatttgaaaaactaaaaaagaaaatatcactacaaatagaaactacgggactgtctgaaaaaaaagtattaaactttaataaattaaatggtagcggaacatttctaaataaagatttattaacattatatctggtttatatgaaccttctagatagtatggaagattttggtttgccatttgctattgattcatttgtaaaaaatgagacagactcaatagcattggaaaaaatgtttggtgcaattgataaatattttttgacattaaataaccaaacatttttttcaataataaaagaaaatttaaagtttatagaaaatcctgttaatgagataaaaatagatagacctttattaaaagagaaatttttttctgatatagagaaagaactaattcaaaatttaaatattttataaaaaatataataatattacgtgtgaatgactagtataatataggaaaatggcgaaatgaaaatgttgtttttcctatattttttctttttaaaattatataatcatttcctaactcaacctttgataggagattaaatgattgtgactcaagaacagttaaaagatattatgaagtaggtaaagaaaatgaattagaacgagtaaaaacaggctgggacataaatccctaaaaaacagcagtaagataattttcaattagaaaatatcttactgctgttctctatttatacaatacttcgtattgaatggcttcgctttcctagggtgccgtctcagcctcggtcttcgacttggcactgctccctcaggagtctcgccattaatactacgtattaacatgtaattttactttgaaatactttaaaaaaataagacactttcgtataatttaataaataccactaaactaaattaacgaggtgccttatgtataaaaattataacatgacccaacttacactacccaatagaaacttctgttagaattcctcaaaaatgatatttcgcgatatgttaatgaaattgttgaaacgatacctgatagcgaaattcgatgaattcagacatcatcgtggcgcaacatcctatcatccaaaaatgatgttaaaaatcatcttatatgcatatactcaatctgtattttctggtcgtagaatagagaaattacttcatgacagtattcgaatgatgtggttagctcaagatcaaacaccttcttataaaactattaatcgttttagagtgaatcctaatactgatgcgttaattgaatctttatttattcagttccatagtcaatgtttaaagcaaaatcttattgatgataattcaatttttattgatggtacaaaagtagaagctagtgccaatagatatacatttgtgtggaagaaaagtattcaaaaatcacgaatcgaaattgaacgaaaattcaaaagcattatatcgtgaacttagttgaagaaaaaataataccagagataaaagaagatggagatagcgatttaacaatagaagaaatagatttaattggtagtcatttagataaagaaatcgaagatttaaatcattctattgagaacgaagattgtactcaaattagaaaacagacccgtaaaaaaagaactgagattaagaagttcaaaaagaaatttgatgattattccgaaagaaaaagtaaatatgaagaacaaaaatcgattcttaaagatagaaatagcttttctaaaaactgatcatgatgcaactttttatgagaatgaaggaagaccatatgaaaaatggccaacttaagccaggatacaatttacaaatagcgacaaattctcaatttgttttatcctatgacctatttcaaaacccgacagatactagaactttaattccatttttaacaatgattcaaaataccttcggttatttacctggagtatattgtagctgatgcaggttatggtagtgagcaaaactatatggctattatagatgattttaataaaacgccacttattacgtatggcatgtttattaaagataaaactagaaagtttaaaagtgacattttttaacactcaaaattggaaatatgacgaacttaatgatgaatttatatgtcctaataacaaaagaataggttttaaaagatatgcataccgtaatgatagatatggttttaaacgtgacttcaagctatatgaatgcgatgactgttcagcatgttctttgaggcaacaatgcatgaagccaaattcgaaatccaataagaaaatcatgaagaattataattgggaatactttaaagcccaaattaatcaaaagctttctgaaccagaaacgaaaaaaatctatagtcaaagaaaaattgatgtagagcctgtttttggatttatgaaggctattttgggtttcactcgaatgtcagttcgaggaataaataaagttaaacgagagctaggttttgtattaatggcacttaatataaggaaaatagcagctcgacgagctgtatattatcaaatacatttaaaaaaagctgatttctatcaaataattaatagaaaacagcttttttacattgcctaagaactttatgtcccagcctgtcaaactttattactcatactataattctattttaatgtcttcgtccatttgggcttcaaattcatctagtagtgctcgtgcttctgcaattgattgtgtgttcatcaattgatgtcgaagttcgctagcgcctcttatgccacgcacatagattttaaagaatctacgcaagctcttgaattgtcgtatttcatctttttcatatttgttaaacaatgataaatgtaatctcaacagatctaatagttctttgcttgtgtgttcgcgtggttctttttcaaaagcgaatggattgtggaaaatgcctctaccaatcatgacgccatcaattccatatttttctgcaagttcaagtcctgtttttctatcgggaatatcaccgttaattgttaacaatgtatttggtgcaatttcgtcacgtaaatttttaatagcttcgattaattcccaatgtgcatctactttactcatttctttacgtgtacgaagatgaatagataaatttgcaatgtcttgttcgaagacatgcttcaaccaatctttccattcatcgatttcatagtagccaaggcgtgttttaacacttaccggaagcccgcctgctttagttgcttgaataatttcggcagcgacgtcaggtcttaagattaagccggaacccttaccctttttagcaacatttgctacaggacatcccatatttaagtcaatgcctttaaagcccattttagctaattgaatactcgtttcacggaactgttctggcttatctccccatatatgagcgaccatcggctgttcatcttcgctaaaagttaagcgtccgcgcacactatgtatgccttcagggtggcaaaagctctcggtatttgtaaattcagtgaaaaacacatccggtctagctgcttcacttacaacgtgtcgaaagacgatatctgtaacgtcttccattggcgccagaataaaaaatggacgtggtaattcactccaaaaattttctttcataatatatttataccctctttataattagtatctcgattttttatgcatgatgatattaccacaaaagcctaacttatacaaaaggaatttcaatagatgcaacatttgaaagggaagtctaagagtagtctaaaataaatgttgtggtaagttgatcaatacaaagatcaaggattatcgtattaaattgttcattattaatgatacactacttatgaatatgattcagaattttctttggctacttttacagtaaagcgattttttagttatcttataacaaagacaaatttataaaggtgatattatggaagatttaaagcattctttaaaaagtttaggttggtggtatttattttttgcgatacctatgtttctgctattcgcataccttccaaactataattttataactatatttcttaacattgttatcattattttcttttccataggtttgattttaactacgcatataattatagataaaattaagagcaactcgaaatgattcattaatacgaatgtgattaaacataaaactgaaggagcgattacaatggctactgaaaaagatataaatgatttgtttttaaatcatgtgaattcaaacgcggttaagacaagaaagatgatgggagaatatattatttattatgatggtgtggttataggtggtttgtatgataatagattattggtcaaggcgactaaaagtgcccagcagaaattgcaagataatacattagtttccccatatccaggtgctaaagaaatgatattaattccagactttgacgaagcaacaaatcttcctgatttatttaagaccataaaaaatgatttgaaaaagtgaagttcgggtgcagagagaactaagcccatcgataaatggtcgcttgttaaagaagagtgacggtcactcttctttatgtgcatattttattttgcctgttttgtttactggcagcagtgtaacaaatatgagtaaggataaaatgagtataatatagaaaccgaatttatcattgatttcattaatccatcttcctaaaaatggagagataaaactttgcagtaacaatgaaattgacgtccaaattgtaaatgaacgaccgacatatttatctgaaacagtgttcattatagctgtattcatatatattctgattgatgaaattgaatagcctagtataagtgatcctaagaataagtaaaatgctgaatttatccaaataaataatgctgaatttatgattaatataaaatacaacaaaaatattaatgttctagttgtaattttcttcgaaagaatagctgaaattaaacctgcacataatcctccaatgccatataacatatctgaaaaaccaaattgtacagacgaaagttttaaaacattatatacatatcctggtaatgatatgttaaagatcattgtaaacaccattggtatgattgaaataactccgaaaataaatatcatcatgttgtcttttaaaaatttccatcccaataaatactcttgcaataaactatttgttgattcttcctctgaatgcgtgggtttatctacacgcaatctaaataacataaaaatgctaattagaaacataattatagtcatcgctataattagagtgaatccatttattttatataatactcctgataatccacctgcaataaacatacctgtttgcaaactaatctctaatagagaattagcatctgtatattgatctggttttaaaatctgtttaactaaacttctagatgttgccatatacgtagtccaacctatcccattaacaatcgcaaatccaatcactaaataggtctcaaagcctataattacgagtgctatgacaatgagtaaatataatattacctgaagaagataggtgattaaaataatgtttcgtctattatatttatcggctagtccacctataataggagaagctaagaaaccagataatacatttaaagctaacataatacctaatagttgggagtcgttggttttgtcgattaaataccaattagctccaacagtactaattccaactccgaatgctgaaattatttcagctaaaaagaacaatctgaagtttttaattttcaacaaatcagtcataaatatcaccttttttcaatgcaagatttgtatttgtgagtgcttccataaattgagagtcatttaaaacatcgaacggtttattaccttctccgatcaaaaatctatagttagtaatattcataaactcaaatattaatttgaattggttgactaaaggttgtgctttggtatgcggattgtcgccacctatgattaaaatcaaatactttttttgtgacatgatttctttgaagttgtctatttgcggatctcgcaatgactcggtccatctatcaatgaagagttttaaagacgcactcatggagtaccaatagagtggtgttgaaaaaataataatatctgattctaaaactttgattaaaatttgttcgtaatcatcattatgaaagttggcacctttgctatgacgattatctgtaaccttttcaatgttgctttgatataaattcacaaagttgacatttaaattcttcaatagattctctactgcgatagctgaattgccatcttttctactacttccaaataaacaagtaatcatagtcataactcctttcgatttacctttataataatatttaatatattattattaaatcagaattcttagaattcaggattcgataaaagggaaccctaaaggaggtactactttgaacttaaacattttaaaatcatttttagtaactagtgaaacaaagaaccttactaaagcatcagagttacttaactattcacagtcaactgtatctacacatattgaaaaattagaaaggcaattagatgttaaattattttatagaaaaaaatatggtatggaactaacggaagaaggcttagcatacgttaaatacgctaaagtgattttagatagtaatagcgaatacgagagagaaataaaaggactttacaataagaaggtaaatataagtattaacatgcaagaaagtcagtatttgtatcgctactataataagattagtgaatggttagctgaacacccatatgtaaacttgaggtttaaatccgcacattctaatttctatattaaagaagaaattgctaatttcaaatcggatattagccttatcacagacgaaaagattattaatagtaacttaactgctattcctataactgaagaacgtttaatatttgttactaacaaagagatgaaagatttcaaattaaacgatattcaaaaccatatattacttgttactgaaaaagggtgtagttacagagaacagttagaaaagattctctataaatatagcttttcaacaaaacaaatgattgaatttctaggaattgagtcattgaaaaaacacttgaaaaattcagatgggattgcgctattgccggagtttattgttgcagatgaattacaaaataaaagtttgtttcaaatagatgtcgatgtcgatattccgaatttagaaacaactttgataattaatcctgaatccagtaagcaagtactagaatcttttgtaaaagatgtctttttataaatatttgtgaaaacgtgtagctatgggaaaactcaaagataataatttattggtaagggcataggagcaattaaaatttccgaacaaggtacacgagtgcttctgaatttatcggcacgcttttacatagatcaaaagaacgcgcactaaaataatcattatatctatgtaacttacatctttgatactacagaagttcgtgcatttcttcaatcgtctcataatcattaaatgccactaagcacgacccgattgtttcacacttttttcaaatctttaaatagcgttcattatgaatgacgccatctataacatttatttatcttataaaatagtacaattacaaagcaccacaacggcgactggactcaccttaaatcataacgacaaccgctaaaaattgattgcaaaacacatcattaattgccatactcaactattttgaaaagtatcaatttcacattgtcaaattattgagtatctcgatttattgttatacacaaacagtatttttgttatcatagagttaataaatataataaattgaataagtaactttacaaaactagaatgattcaattcaatcacaattatttgaaaatagaggtgagcaggtgaacgatatgttaattagtctcgtaatcccagtttttgctttgttagttattggtggtattatttgggcaattatagaaggtatagtacatatttcaaaaaagaataaagcaattgataatttttttaacaaagttaataaagtaagtgagacatataaattcgctactacttttttatttctaatcttggctacggctggtatttctcaattttatctatattatatagtatcagagtttcttttttttctggttatatttacctttggtattgcaggtatcatttttttaatgccatatggcttatgttttctaccactttataaacaaaaaagaaaaacagacattaaaaaaatacatggcttacactacgattggtttgtcaatttatctaggcttatctctagttttggttcacactacgaaaatttatatggacgagggtggcgtaagatactattacggtagttttgtaatgaaacaagcgggcggttatgcttatttagctttagcattactttcaacgttgttaattgttgcgaaaaaagctacaaataaaaataaagaaatcgaaaccgtcgacaatacaaatataacggaaagataattaagggagtactcattcaggagtgatcttttttgatgttcaaatttagttggaaatgaagaagcggaaacatttgtgagtggaaaataaaagttaagctgaaatcctatcgaacgtatctgtaaagtaaaaaattaacgccacaattttcatcgtaattaaaaatagacatcctagtaatatgctttttcaaacaataatctaataatatgtccatctacaaaatatttctacgcactaaaaaaggcggactaaatcgtccgcctcaatgcacactaccgcatgttgtttttatagtgtttctttatagaatgattcaagttttggtaatacttgattaatatattctgggatatcatataaatccacgtgtgatgcgccttcaattttatataattcgttgttattgcctgctgctttttcaacagcattaacgctatattcaatcgtgtctgcttctgtacctgcgattgctaagaatggttgtgtcaacaattcatcaatatatgtgaaaggcgcaaatgttaatacttctgaaaaacttcttaataatagtttgtttggtgcgtttttatgttgaccacgttcagttaaataataatcatgcccttgtaccattgttgaattttcaggcatagaatcatcaatttcttcaggtacatagccagtaatgccataatctgcgccatttgcttcagctgtacgttgatctgcaacttgtgtcataaatgccaattggtcatcaattgatactacatcgccaggacctttacggaataaagcaccaatatctaccatacttacagtagctaatgttttaatacgacgttctgttcttgctgcacttactgtatatccaccaccggcacaaacgccaagcgcaccaattctgtcattatccacaaagtctaatgttgtaagataatcaactgaagctctaacgtcttctgttctcgcaaatggatcttctaaatatctaggagaaccttcactttcaccttgatgtgatgcatcatatacaaccgtaacgtagccgaattccgcaagtttctctgcatacatacctgcagtttgttctttaacaccgccacctgggtgacaaactgtaattgctggatattttttgctttcatcaaattgttctggtgtatataaattcgctgctaataaatttgttttacttttaaaattaactgattgtttcatagattaaatgcctccatctttttatataagtcattcatttgttgtagatatttattactcttgtgtgtataatgccatactagagtatttaaatgtacaattcaattaacaaggaagcacatatgtgttttaatacacagttttataaaaatgggttttaaaaggaaggagtattattatgaatgttggggatttacgtgttgttaaaacgagagctagtattaaaaaggcatttatgaccttactttttgaaaaagattttgatactatttcgattaaagaaattactgaatttgcgcaaattgggagaaaaacattttatctacattatattgataaatatgatttactagatcaagtggtatcggaaaaattgatagaacttgagcaaatttctgaagccaaaaaaagtctcggtatccaagaaggtacacaattatggtttgagtttttcgaaaataatagaacatttcttatgaaaatttttaatatcaacaacgcttcaaattataagaaaaagctgcttcattttattgaagaagaatttaagaaaaaagttccgacacgtgttgctactgaaaaaggcttagactacgacttatatattaattttattagtaacggtattatcggactactagatatctatctaaacagcagtgaagatacagaagaacaagaaaaaataacattgcaggtgtcgcgcctactatctttgtacgatttaatttaaaactaagctatctatattgaaatataattaagggagtgctcattcaggagtgctcttttttgatgtccaaatttagttgcaaatgaaggcatagaagaaatttttatagtcatttattggataatgaattatggtcatatcgattaattttattagtgaggattttacaaacatttgttgaataaatatggtaatgataatatatgaatatttttgaaaaaacactaatatgattaaattatttgttaaaatagcattaagtaaaaaacaaacagggaacaaggtgggatttcatgagtcaattgctaaatgatacgttatcggcttggttgttaattgaatctttaagtccaggagaagtaaattttacagcggaagatatactctcagctgaacattttaaaaatggtacaaagcaagcacagcttcaaagttttgatgaatattttgaaatatggaacgatgaacgttttattgtgtcagaagaaaaatcagaggctggggaacttatatttaaattttatagacattgcttccgctataatgaaattaatttgaaaattcaagatatttttgaaaatcactctgatattcataatccaaatgggacacactgttatggttacacatttaacacagataaacacggcaaagtgatagttgattctatacatattccgatgattatgagtgcattaaaagaaattgaaaagaacaaaaatgccaatatagaagaaaaatttaatgattctgttgaaaaatttgttcaaaaagtaaaagaaattttagcagatgaaccaattaatgaatttaaattgaagaagatggacaaagcttatgatgagtacttttctgtattaaattcaaagaaagatggattatttggacattatgtagcaatagaatatgtgaaagatagtgatttaccacagccggaatttaacagcttcttcataagtgatattgagaaagcaagaaaatctcctaatcaaactttaattgattacattgtgggtgtagaagaaagtcagcgcatagaagtagatgaaaataaagaaatgtttgacaaatttttacatccttcacgtttgcctgatggacgctggccatcacagactgagtttagattgtctttaatgcaacagcttgctgtaaaccaaatcacgagtggtaatgaaagaataagttcagttaatggtccgccaggcactggtaagactactttattaaaagatatatttgcgcatctagtagttgaaagaggtaaagagttagctaaactaaataatcctaaagatgcatttgtcaaaataaaaattcatgaaacggatgataaatacgtatacttactaaaggaatctattgccaaatataagatggtagttgcatctagtaataatggagctgttgaaaatatatctaaagatttaccgaaaattgaagaaattataagaaatcccgaaaaatgtaaattccctaaatatgaacagaattattcaaatttagcacatgaattaaaagattttgctgaaatagctgaagatttgattggtgaaagtgcctggggcttattttctggagtatttggtaaaagtactaatattaaccaagtattgagtcatatgttaaaacaagatgcgaatgatattggctttgctaaattactacaaaatgagaataatcgtatgagttataacgagttaatgagtgaatggcaatcacatcaacgtgcatttttagaagagttgaggcatgttgaaatgttaaaagaagaatctattagagcctatgatgtttataaaaattgtgagtcttactctaagattgaacaggttattaatagtgaaaaaacaagtattgaagaacaggtatatcatttagataatgaaacgttacgagacaataaagaaatagaagatttggataatcgaattaattataatacaaagcaaatagaaactttaaatgagttaattaaatccatcaaagaaagcaacaaaggttttattaacaaactgaaggcgatgtttaattcagaagaagatgaaagctataaagatcataataaagagaagcaacaattattaacacaacagttagagttagagaaatgtaaaaaaacaaacatgaagaccttgttagcaaactaaaagaaaaagagaaattaattaaacaattaactaaagtacagttgcaattagacgagttaaattcacagttacaagagttagaagcatatcgtattaagtcaaaaattacaattccagaaaaagatttttggagtgacaacaattatgatgagcgccaagttactaatttgtggacgagtgacgaacttcaatacagacgtgccatgctctttttaagagcaatgatattgcataaattattattgattgctaataatacaactatttattatgcgattaatgattttaaagatagaaggaaattaattgatgcaaatccagataaagtacacaacgcatggaatgtgatgcatttaatatttccagtagttagtacgacgtttgcaagctttaaatctatgtatgggggcataccaaaagatttcatagactacttatttattgatgaagcaggacaagcaatacctcaagcagctgtgggagcattatatcgttcaaaaaaagttgtagctgtaggtgatccgattcaaatagaaccggttgtgactttagaaagtcatttaattgataacattcgtaaaaattatcatgttccggaatatctagtttctaaagaagcttctgtgcagtctgttgcagacaacgccaatcaatatggcttttggaaatctgatgctactgatagtaatcaaaaaacctggataggcatacctttatgggtgcatagacgatgtttaaaacctatgttcacgatagctaatcaaatcgcttataataataaaatggtgctacctagtaatattacaaacgtaggtaagaccggttggtatgacgttaaaggaaacgcagtacaaaaacaatttgtgaaagagcatggtgaaaaagtattggaattactagctaatgattggtttgaagcgattaaggaaggtaaaaatgagccgagttcatttgtaatatcaccattttcagcagtacaacaacaggttaaacgtatattaaagcaacaactaccggctagaatcgatattcaacgttcaaaagtcaatcaatggattgataaatccattggaactgttcatacttttcaaggtaaagaggctcaaaaggtgtattttgtaataggtactgataatactcaagatggtgctgtgaactggtcatgcgaaaaaccaaacttgttaaatgttgcagtgacaagagctaaaaaagagttttatgtaattggtgacatgcaaagaatacagatgaaaccattttatgagacgatttttaaagaaagaaatgtaaagtaacatacaaaaaagtatatagaggaagttatgttcatgcaaaatagaaatgattttatagaaaagctattagacaaagctcaaattaaagaaggtatgcgtgtactggatataggttgtgcgactggtgaggtcacgcaattaattgcaaaacgtgtggggacgaatggtgaagtcgtcggtgttgatgtgaatgagtcattacttaaaatcgcaaatgaaaacaatcaatataacaatgtatcatatcaatattctgatatatatcaattgccagaaactatggggcattttgatgcgattgttggtagaagagtattaatgtacttaccagatgctgaaaagtgtttacaaattttgaaatcaattttaaaacctgagggtatattatgttttcaagaaagtgatgctattaatgcaggtgttggtgcagatgcactatctttacatcaatcagcaattcaatggatttgggaaaaagtgaagcaagaaggtggcaatattcatatcggtcaaaatttatataatttgtttaataagaatggaatgcatgttgtagattattttgcagaggcagtgattcaaacgtcaatggacaatgatttagcatggcttgtagatgtaatgctaccaagaatgaaagcgcacggtgtcattaatgatgatttttcactagatgagtttaaattaaaccttgaacacgaagcaataaacaatcagtgtgcatttatacgtgacatggcgtttggtattatcggaaaagcctagtttaaaaaacgctgaaagcagcatgttatcagcgacagtgttttaacttgtgaagttactaatggattttgaaaataacagcatttctataggctaatcaagtgatacttaattaccgagcaatttatacattttaaaaggagtaaaattgaataatgaagaaatttaacaactggatattaaatgcaataagtggatctcaaacagacaagaatgaaacaactgaagaattaaaaggggcaaaatttatcattttatatgcatattcaatgctcgttttgcttgcgttagtaatttctaacatattcattcacattttggagcctaaactttcaattaccactgaaatcatcatcgttttgattttaattgaatcactaattggactacgtttcttgaaagggtacgatgttaggcgtggcaaagataaagaaaataagaaaaatagtaaggatttcgttaaactaaaatcaattttagtagcaattttatttacatcattggcgctgacagcaggcactatagctgatatatacggtatcactgacttaggaaatactagaagtgatttaatcgtttggagcataggtggtattatatttggcctcgtatgttacacaatggaagataaaaaataaagataaggggctggcgattataaagctagctccttttttaacttatatatgtaaagaactatcctaaggttttttaatcacacgtcattaatttctataattaatactcttgaatattgtttaaataagttttaaaattttacacatatttttatttaaaaaagatgtataattaatgtattaaatatagaaagaagttgatattatgaaaaagtgtattaagactttgtttttaagtatcattttagtagtgatgagtggtttatatcattcagcacatgcgtcagattcgttgagtaaaagtccagaaaattggatgagtaaacttgatgaaagcaaacatttaactgagattaatataccgggttcacatgatagtggctcattcactttaactgatccggtaaaatcagtttgggcaaagactcaagataaagattaccttactcaaatgaagtcaggagtcaggttttttgatattagaggcagagcaagtgctgataacatgatttcagttcatcacggcatggtttatctgcatcatgaactagggaaatttttagatgatgctaaatattacttgagtgcttatccaaacgaaacaattgtgatgtctatgaaaaaggactacgatagcgattctaaagttacgaaaacatttgaagagatttttagagaatattattataataacccacaatatcagaatcttttttacacaggaagtaacgcgaatcctactttaaaagagacaaaaggtaaaattgtcctattcaatagaatgggtggtacatacataaaaggtggttatggtgctgacacgtctggcattcaatgggcagataacgcgacatttgaaacgaaaattaataatggtagcttaaatttacatgtacaagatgagtataaagattattatgataaaaaagttgaagctgttaaaaatttattggctaaagctaaaacggatagtaacaaagacaatgtatatgtgaatttcttgagtgtggcgtctggaggcagcgcatttaatagtacttataactatgcgtcacatataaatcctgaaattgcaaaaacgattaaagcaaatgggaaagctagaacgggttggctgattgttgactatgcaggatatccgtggcctggatatgatgatatcgtaagcgaaattatagatagtaataaataaggattcaataatgatattaagacgagtatgaaaatagttagattctgattattttcactactcgtttttattttgaaaataagtaataattcaacaatattataaatcgaacagattgtttgtgaaatttttgataatattaaagtgaaaaagtgttataaattgataaatatatgtaattaacataaacaaatcattttaaaaagaagagagttgtaagatgatgaaacgattaaacaaattagtgttaggcattatttttctgtttttagtcatttttattggggggtgtggcatgggtaaagaggcggaaattaagaaaatttttgaaaaaacattgagtatgtatccgattaaaaatctagaggatttatacgataaagaaggctatcgtgatgatcaatttgataaaaaagataaaggtacatggactataaattctcaaatggcgactcaaaataaaggggaagctttaaaaataaatggcatgcttttgaagataaatagaaatacaagaagtgcaaaaggattttactatactaatgagataaagacagagaaatataaagtagctcaggataatcaaaaaaaatatcccgttaaaatggtcgacaataaaattataccaactaaagatatcaaagatgagaacataaaaaaagaaatcgagaactttaagttcttcgcgcaatatggcaactttaaagatttaaaaaaatataaagatggagatatttcatataatccagaggtgccgagttattcagctaaatatcaattaactaatgatgattataatgtaaaacaattacgtaaaagatatgatataccaacaaataacgcgccgaagctgttgttgaaaggctctggaaatttaaaaggttcatcagttggatataaaaaaattgaatttacttttgtagagaataaaaatgaaaatatttactttactgatagtctgtatttggaaccaagtgaggataaataatcatgattcgatcaaattatgaaatcgattcaggacaacctaataaaaaggagagagttgtaagattatgaagtgtttaagtaaatgggcattttacattagttttttgatattagtcattagtatcactgatggttgcggtataggtaaagaagcggaagttaagaaaagctttgaaaaaacattgagtatgtatccgattaaaaatctagaggatttatacgataaagaaggttatcgtgataatcaatttgataaaaatgataaaggcacatggattgttaattcggaaatggcgactcaaaataagggagaagctttaaaaattaaaggtatggtcttgtatatgaatagaaataccaaaacaacaaaaggatattattatgtaaatgcaataaagaatgataaagacggaagaccccaagagaatgaaaaaaggtacccagttaaaatggtcgataataaaattattccaacaaaagaaattaaagataaaaacataaaaaaagaaatcgaaaactttaagttttttgttcaatatggcagctttaaagatttgtcgaagtacaaagatggagatatttcatacaatccagaggtgccaagttattcagcaaaatatcaattaactaatgatgattataatgtaaaacaattacgcaaaagatatgatataccgacgagtaaatctccaaagttattgttaaaaggttcagggaatttaaaaggttcatcagttggatataagaatatagaatttacttttgtagaggaaaaaggtaaaaatatatattttagtgatagcttagattataaaaaaagtggagaagtataattatgtctaaaccagaatatgaaattgatcctggaaaaagagagtgatgaaatgataaaacgtataaacaaattaggtttaggtattagtcttctgtttttaatcatcagtattactgctggttgtggcatgggtaaagaagcggaaattaagaaaagttttgagaagacattgagtatgtatccgattaaaaatctagaggatttatacgataaagaaggctatcgtgatgacgaatttgataaaaatgataaaggaacatggactattagttctgaaatggcaattcagaaaaagggagaagccttaaatataaaaggtatggttttgaagttaaatagaaatacaagaagtgcaaaaggattttactatgttaatgcgataaagaaggatgaaaatggcagacctcaggataatcaaatagaatatcccgttaaaatgattgacaataaaatcattccaacaaaagaaattaaagataaaaacataaaaaaagaaatcgaaaactttaagttttttgttcaatatggcagctttaaagatttgtcgaagtacaaagatggcgatatatcatataatccagaggtgccgagttattcagcaaaatatcaactaaccaatgatgattataatgtaaagcaattacgtaaaagatataatataccaacgaataaagcaccggagttattattgaaaggttcaggaaatttagatggttcatcagttggatacaaaaaaattgaatttactttcgtagagaaaaaaggagaaaacacttactttacagctaacctacattttaaaccgagtgaggatgaataatcgtgactaataaagagtatgaaatcgattcaaggaaacaaaataaaaagaagagagttgtaagatgatgaaacgattaaataaattagtgttaggtatcagttttttgatgttagccatcagtattactgctggttgtggtataggtaaagaagcggaaataaagaaaagttttgaaaaaacattaagtatgtatccgattaaaaatctagaggatttatacgataaagaaggttatcgtgatgatcaatttgataaaaaagataagggaacatggattataaattctcaaatggcaattcaaaataaaggagaacctatgaaatcaaaaggcatggttctgtatatgaatagaaatacaagaacaacaaatggctattattatgttaatgtgattaagggcgaggataaaggtaaacatcaagacaatgaaaaaagataccctgttaaaatggtcgacaataaaataatccctactaaagaaattaaagatgaaaaaataaaaaaagaaatagaaaactttaagttttttgttcaatacggtaactttaaagatttatcgaagtacaaagatggagatatttcatataatccagaagcgccaatttattcggctaaatatcaattaactaatgatgattataacgtaaagcaattacgtaaaagatatgatataccgacgaataaagcgccaaagttattgttaaaaggttcaggtaacttaaaaggttcgtcagttggatataaagatattgaatttacgtttgtagagaataaaagtgaaaatatttattttagtgatgggttagttttcaagccaaatggaggtaaataattatggctcaatcagaatatgaaattgatcccggaaaaataactagtaatacagaagaaactagcgcaatagctaatatcagttatgaaatagagaacgcaaatgataacaatttaaagtatgacaaaattaaagatcaaatttataaactaaaacgttataatcagtttcctaaaaactaagactacatagatagttacacagatcccagtacggggaccacggcaacggcatttttaaataaagatacaggtaaagttactgtaggaatggctgggacaaacattcacggcgatcaaattaaaaaagtagcttccagtttggtggcgccatcatcaattcgaccctctaatcaagatttgaaagatgtactaggcactatggaggatggtgctgcggatcttgctattggagttggattggtcaattataaaggaaaacattttgcaaatacacagcagtttattgagaatttacaaaaaaagtacgaaattgataccgttactggtcattctttaggagggagagatgctatctttcttgggcttcgttataacatcaaaaatgttgtggcatacaatcctgctccgttagaagtaaaaagcattcgtaataaacttggtggtcaattgtttagaaatacgacatttccagatgaaaaatatttaaaagagttaatggataattatgatggagatattactaaggttataactcaaaaggatggattagactatttagtgaagcatacagatcatttaacttgtggtgatgtgttacgtataaacaatggtcagggccatgcgatggagaattttttaggagaaaaagaacaacgtgaaataatcgaagaactaatgttagtaaaaggatatcgcgatgcaaatgacaaagcatttaaggctttgaaaaaaaatactgagaaaaaactcggtaaaatagatgaaatcaaatcgaagttactgcaaacgaacggtggtgccctctcgtcttctcaacaaaaattgcttgaaactttggtggcattttcggtagctgaaggactaagtaaaatggttgaccaagaacttcagcagttgaaaaatatgttcaatcttatggatgagaaatttgaagcaaattggaaagacgcacaagaagctagtgatattgtaggtaaacatctttcatacccagaaaaggtaagtgcattagataacggtggtgtcaatgaaagtaaacttgcgaccgaaccacataatgaaataaaagaaaaactaaataaaattacggacttatctaagaaatataattcgtatttacagcaaatcgaaaaaagtattaatgaaatagttgctaaggatcaacaattggcagggcaaataggtgatttaatatgatgtttgaagaatacaaaaaaatagatgatcttgaaaatgcatatgaaatagagttgaaacgtattgaaagggagatacaaaatcttagtgatttaaaatatcaccttagaagagaaaatgaacaaagttatgatgcatttttgtatttaaagaataaaatgaactatagtgaagagtcaaatgctaaggtgagaagactagttgaagaatttgattatgaagcagatagttatattagacaaaaagagttaaagttagaagattataaagaagaaataagaagagaatatatacagcaatctgaaaaaataatggaggcgaagtagcttatgggaatccctgatccgttatctaatcctatgtctgatcctttactaggagatagttggatggtaggtgatttgaaaaaaagacaggaaaaaaactaatcacaacagtcatcgcacctgaacatgatgaaaagcatcgtgaaaataaaagtaaaatgaaaaaatctgaaaagcaattgatcaatcagttaattaatcatggccatacatttaagagtgattttaaaaatgtagctaaaggtgattgggttaataaagccatgcaagacttagataaattaggcaatgagcttaaaaaaataatgaattagttgaattgtcacatactttttcaaacaaacaacgaactaaaaaatctatataaatatgattaaaagaattcataaccattcgtaaaggatggttatttttaatagtaaacaaaattgctgctaacttactttttgaaccgagtgaggataaataacctcactgcctcccacacgattcaatatgaaattcaaatatgttgctgtaaaataatgtaaaataaacgtattcatattactgaattgagggatagtatgcaacgtgattatttaattcgagtagaaactgagagtatgtcagatttcaaaaggctcaatggtttaatgattggttttgttattaaagatgaggcgcacatttatgatgaaaataatatgacgcaatgcaacagtggcgacattttcatcattaaccaccgcgacttgtatcgatttcaacttcaacaagatggcatcatatgttatatccaatttcaaatgaaatatttagcagacaagtttgatgatgtgcattgtctatattttcacttaacagatgcgaccacaacaaaaaatatacatcaactgagaaatataatggcaagactggtttcaacacatattcgacataatgagttgtctaaattgactgagcaacaacttgtgattcagttgcttatgcatatgattcattatgtcccgcgtacatatcattcgaaccaaagtatcttaaatgatgataaagtgaatcaagtatgcgactatatcgagttacattttcatgaagacttaagcctttcggaattaagcgaatatgttgggtggtcagagagccatctgtctaaaaagtttgcagaatcgctaggtgtaggattccagcatttcttaaatacgacgcgaattgagcatgcgaaactcgatttgacatacacagatgaaacgattactgatattgcattgcaaaatggcttttcaagtgcagcgagctttgcgagaacatttaaacactttacgcatcaaacgcctaaacaatatcgaggtgatcgtccagcaatcactgaaaaccagcaatcggcacaacatgattatcacgaccgtgaattgatattacttttaaatgactacattgaagaaatgaatcattttattgaagatattgaaaagatgaactataaagagattgcctttaaaccaactaatcaacaactaaatcaatttaatcatattattcaagtgggctatttgaggaatttgctcaatacacagtatcaatcacagttacttacatgccatcatgattttcatgtcaatgaagtattagcatatgatgtgatgccatatattatgaaaaagctcaatgtgccattcacgtatgatgcagaaatttcgaatatattttatgatatcgatttgtgtttagactttttattagatcataactttagtttgactatgcatttggatcagtatgactcacgtgattatatcgatgcatttaaagtatttatccatcacgttgccctgcatgtcagtcatagaaaagatttgaagttcaacttgtatgtgacgacattgcacacgtctttgattgaaatgattgattattttaaagcattattccctaatggtggcttgtacattcacttagatcaagctacggaaagacatctaccattgctgaaacgacttgagccacacatcgaccattttgtatttgatgccaattcaaatgacgctgttgattttaataaaatgaatgatgatgaatttaaaaccgcaagtcaaatgattattaataaaacgaattaccttatcaatttaatgcatcgtcatcatctaaagcgtccactcattttactcaattggaatacattgacgggtgatacttttattacaaacggcgaatattttagaggtggtatcatcattgagcaattattaaaattaagttctaaagtagagggtatcgggtattggttgaattatgatttgcacgtcagtcattgtagaaatgaacgggattatatgaattctattgaactgtttcatcaatataatggaaaacgtccggtctatttcacggcattgctatttaataaattaacaagcaatattttatattctgatgatacatgtattgtcacgggaactgattcaaattttcaaatattgttatatgatgcaaagcattttaatccgtacttagcgttggacaatcaaatgaatatgcgtgcaacggaaatgattcatttgaacattaatgccctggaagaaggtatgtataagattaaacattttaccttagataaagaaaatggtgcattatttaatctttggcgaaaacatcatacgatacatggtatggacaaggattctatagattacgttaatcgaatgagttttccaaaattagaagtgtacgatatagatgtgacggatacgctggcattaaatattaaaatgattacaaatggaattcacttaattgaagtaaaacgttacccaagttcataaaatgatcacaaatcacaatttatgttatacataatttgtgattttttgtattcaaagttaaaattgcaaaaaattaatggttaacatctctgttgttggcaatataaataatgatcaatcatatatgatgtaactaaggagatgaatgatatgaatcaacaattaattgaagctttaaaatcaaaagaagacaaaatgattgagatcagacgttatttacatcagcatccagaattatcttttcatgaggatgaaacggcgaaatacatcgctgaattttacaaaggtaaagatgtagaagtagaaacgaatgtcggaccacgtggaattaaagtaacgattgattcagggaaacctggtaaaacattagcaattcgtgcagactttgatgcattacctattactgaagatacaggattatcttttgcatcacaaaataaaggtgttatgcacgcatgtggtcacgatgcacatacagcatacatgcttgtattagcagagacgcttgctgaaatgaaagatagttttacaggaaaagtcgttgtgatacatcaaccagctgaagaagtaccaccaggtggtgctaaagcaatgattgaaaatggtgtattagacggtgttgatcatgtattaggtgtacacgtcatgagcacaatgaaaacaggcaatgtgtattacagacctggttatgttcaaacaggacgcgcattcttcaaattgaaagttcaaggtaaaggtggtcatggttcatcaccacatatggccaatgatgccattgttgcaggtagctacttcgtcacagcgttacaaacagttgtatctagacgactaagtccatttgaaaccggtgttgtcacaatcggttcatttgacggtaaaggtcaattcaatgtcattaaagatgttgttgaaattgaaggtgatgtacgtggattaacagatgctacaaaagcaacaattgaaaaagaaattaaacgtgtatcaaaaggattagaagcattgtatggtgtaacttgcacattagaatataacgatgattatcctgcattatataatgatccagagtttactgagtacgtggctaagacgctaaaagaagcagaccttgaatttggtgtcgaaatatgtgaaccacaaccaccttcagaagactttgcatactatgctaaggaacgaccaagtgcctttatttatacaggtgcagctgtggaagatggtgaaatttacccacatcatcatcctaaatttaacatttcagaaaaatcattacttatttcggcagaagctgtagggacagttgttttagattaccttaaaggagataactaacatgaatgaaacgtatcgcgggggcaacaagttaatcttaggtattgtattaggtgttattacattttggttgtttgcacaatcacttgtaaatgttgtgccaaatttacaacaaagttttggtgcagacatgggaacaattagtattgcggtaagtctaaccgcactattttcaggcatgtttgttgttggagcaggcggcctagcagataaaattggacgcgtgaaaatgacgaatatcggcttattattaagtattattggttcagcattaattattattacaaatttaccagcattgttaattttaggtcgtattatacaaggcgtatcagcagcgtgtattatgccttccacattggccattatgaaaacttattatgagggtgctgaacgtcagcgtgccttaagctactggtctatcggttcttggggtggaagtggtatctgttcactcttcggtggggcagttgcgacaactatgggttggagatggattttcatcttctcaattatcgttgccgtactttcaatgttactcatcaaagggacgcctgaaacgaaatcagaagttaccaatacacataaatttgacgttgcaggtctaattgttctagtagttatgttattaagtttaaacgttgttattactaaaggtgcagcacttggttatacatcattatggttctttggtttgattgcaatcgtaattgtagcattctttattttcttaaatgttgagaaaaaagtagataatccacttattgattttaaattatttgaaaataaaccttatacaggtgcaacgatttcgaacttcttattaaacggtgttgcaggtacattaattgtagcgaatacattcgtgcaacaaggtttaggttatacagcattgcaggcaggatacttatcaattacttatttaatcatggtgttattgatgattcgagttggtgaaaaattattacaaaaaatgggttctaagcgaccaatgttattaggtacattcattgtggtcattggtattgcacttatttcattagtattcttaccaggcatattttatgttatcagttgtgtcgtaggatatttatgtttcggactaggcttaggtatttatgcaacaccttctacagatacagctatttcgaatgcaccgttagataaagttggcgttgcttcaggtatttataaaatggcttcatcacttggtggcgcattcggtgtcgcaattagtggtgcagtatatgccggtgcagttgctgcaacgagcattcatacaggtgcgatgattgcactttgggttaacgtattaatgggaatcatggcatttatcgcaattttattcgcgattcctaatgatgataaacgtgtcaaagatgcgaaataataacgatgacacgcccagtgttttgataatgatttaaatgaaagtaaagcaaattaaatgaggaaatgtatagagcagtgcatatagataaatctatgattggattaacactaatataaatataaatgaaaaaccatccacttaaacttttgataagttaggtggatggttatttattgcgttgttctaaaaatttggacacttatatggaaagaaatatataatgtgaaggttatggcaattcgcttcaatgaaggcgacgtgtaaaagtgtatattaaatgattcgaggtcagactccgagaacagtgtccgtcatgcttaccgcatactaatgaagcattattatatcaatgtttatagtcgatttaagataataaagtttgctaaacaaaaaagccaacccatgaatgttggattggctttgtataagcatattaagttctaatttttatataaggtatgaatataaataagacattaaaaattaaatttcagttgttgcaatttcttcatctgtaggtacatcatcgttaagaccaacaagtgcttcagaaacatttcgtgaatgataaccgatacgttcaagaacaccaatcatatcgatatatagtaatccgccttttgttgtacattcaccacgattaaggcgtttaatatgacctttgcgtagtttatgttcaatattaaatgattctctactacgttctacaatttcatcttttttcgttttgtcataaacatctaacatgtcgatggctttatcaaatgactcagcaacatggttgaataatttatccataccgcgttgtgcatcttctgtaatgcgaatatcttcatcgtgttggcgttttaattgagcgacatactcttctgttagctctgctacttttaaaatagagcgattgacatcaaacataactgctaaacgctcaacgtctgccttcgtaatggcttttgtagaaattctaactaaataatttcgaatactatcattgattgtttcaacagcttgatgcttttgttcaagctttttgatcaattttttatcgtcttttgtaatttcgcgaatgtcttcaaacattgataagacaatctgacccacattttgtaattctttttgagtttcttgtaatgcaacaccaggtgcgtgataaacaagatctttgtttaagtgctgaggtttatagtcatcagcaatatctttacctgggacaagctttgtaactatccatgctaaacctgctacaaatggtaattgaatcaaagtatttgttatgttgaagataccatgtgatactgcaatcgtcatcgctggttttaagtgccatacatcttgtaacaaactaatcaaatgaatcacaactggcaagaaaattgtgaagataattaccccgattaagttaaagatgacgtgtacaagcgccgcacgttttgcagcgattgagccggctaaactagctaagatagctgtaatcgttgtaccaatattatcgcctagtaacacagggattgctgcgtttaagctgattaaatcttgttgataaaattcttgtaaaataccaatcgtcgcacttgaactttgaactagtgctgttaaccctgcgccgacaatgacagcgagtattggatttgtagacatatcaagcattaattgcttaaatccatctaatgatgctaaaggtttaacggcatcacccataaattctagaccgaaaaatagagaaccgaaaccgaatagtatgcggccaatgttattgattttagagcgtttaaagaaaaagattaaaaatgcacctaatgctaaaattggcattgcatattcgcctaaatctataccgataataaatgcagttaccgttgttccgatattagcacccattatcactccaatggcttgtttcaatgtcataaatccagctgttaccagtccgattgtgataactgttgtacctgaactactttgtattaaaatagttacaacgatacctgcaataacacctaatactggatttgatgtaaatttgtttaaaatatctcgtagcctgtctcctgctgatgcttgaagcccgtctcccatgatttttaagccgtaaaggaaaatacctaaaccacctaaaaaggagaaaatgacttctgtaaccgacatttccattatttcacctcaaataagctttatatttagattatcgcttataattgtaaatttaatgttaagattaggtaaaattatttaacaatatatgttatttgtatatgacttgtaaaatatcgtcacttattatgtaaattttcagtgtgaaatggcaggtttgcaatcacttgtttaacaaaatgatgcaatcaatcatacaattatgtgtcatcaaaaaaatcatgtgagtgggataacgaaataaagtttgtgaacatatcatttctttcccactccatgatttggaatcaccaaataaaaatctattaatggttttcgttataacaatttgtgctcttttaataatgactcaatgtacgtaccttttatctttttaaggaatcctgctaatgcgagtttttgcattttcgaatctttagtaatctcgcgcaaatcttgatggtcattcagttcgtatatggcatccattaagacgcgaagatcaaatgtactattgatgacctctggaataccacgatctatatttagtaattgataaacagcttccatggcagtacgaaccgaatattctgttgtaaatacagtatctcgctctgtttctgcaaagttaccaataaatgctaaattttgtgattgatgcgggacgactaaaggtctatcgccgatagcacgcgtcatgaaataagaggtaatatatggcatataaacaggaatcgtattagatgcatgttttgctaagtcttcaattttgtcagttggtacacctaagtgatatagccattcttgacacatttcattaccactacattctgtgattggctttttaatataatcgccgtttacatctgaatataaagcataaatccacgtagatatttcatttttaggttggtctttaaactgttgctgacgattgattgtaaaactgatttgccatgcagaatcattgattgtaataataccgccagtaaccgttttgcctgcaagtggatcacgtttacaaatgctttctattgtatcgataatatctttattgtttgttgtcgatgttgctgaaacaaaccaactttttttaggaatattttggcaaaacttatcaggattaccaaattcaggactttgtcgcgctaaatttttccatagtgtccaactaccacctaattcgtcagttggtggtgctggtgtatcattatcaccatacgtagagctttccgtaatactaccgtttgtcacaaagacaagatcatctacagtcagtttaatagattctgcattaccattacggtcaattaatatttctcgggcaattttttgacttgtcgtaacatctactttaatatcttctacttttacatcgtattcaaattgaacctcatgcgattttaaatattcaaccataggtaatactaaagattcatattgattatatttagtgaattttaaagctgaaaagtctgcgagaccaccaatatgatgaacgaatcgcattagatagcgacgcatttccattgcagaatgccacggttcaaatgcaaacattgttttccagtaaatccaaaagtttgaattaaagaagtcgtcggaaaatacatccgtgattttgacatcatctaaatcttcttcattcgttaagcataaatctaaaatttctttaattgcttttttggtcaaagtgaagtctccatcggtaactaaacgttgaccctgtttttcaataactcgacagcgagaataattagggtcttctttgtttagccaatagaactcatctaatacagacgcgttatcgatttctaatgaagggatagatctgaataagtcccacaaacattcaaagtggttctccatttcacgaccacctcggacaacatagccttttaaaggcatattttcaccatcaagactaccacctgctttaggtaactcttctaaaatatgaatcttagaaccttccatttgaccatccctaattaagaaacaagctgccgcaagtgaagctaacccagacccgattaagtaagcagatttgttttctacattttcaggttttttagggcgcgcaaatgcttcataatttccataactgtaatacatatccaccaagtcctttcgtattagaatacactcagactatacccctttgtgaattgcaaatattagtatttatattggtaaatttgacaaaattagatcttttttatatttttgatttttaaaattttatcattcgaatgtttttggattctgaggtgcgggacttggaataattcgaatcattattgtggcatgttaaacagctaaatataagctatgcacatttaacaagcggatactcctgacgcaattatagtatcattacatattgtttaatcgtttggggtaatgtaattaaaaggtaaaataggcagagtgttattcataaaatgtaaagaaagaggcgatagaatgtctaaaatcaggtcttttacaatattaagtctacttatttacttagctatgatgtgctatacagtagtgacctattcaaaattaccaaccaaagtacctattcactataatttagcagggaatgctgataactttgctgataaatgggtgctgcttttgattaatagcgcatttatagtgatttggcttatatttttcattgcaggtagatactatgaacgatttgccaaatggtcacattataatcatacaccacgtgaaattcgagcgattaaattatttttaagtacgttaaatttagagattatgagctatatgtctatcttcacagtattagaaatttggcaaatacaacaccatcatcaattcaatttactatggtttaatatgatatttatcattatcattggtttgacgcttgtcatattttgtttacttcctacaattcataaaatgagagattctcaataaaaatataaactgtcatgatgcagttttgaagcggattcctgatattattataaataatatctagtatttataattaaaatgatatattatttattatagttaaatattgtgtatattttgtgaactttttgtaaaaattcgattgcctgtcacatataggagtgttacattttaaatatgtgatcatcgcaaaatataagttgaaataggttgtagattaatcaggatgataaatattttatataaagagagggagtcattatgacactacttactgtaaatccattcgataatgttggattatcagccttagttgcagcagtacctattattttatttttattatgcttaaccgtttttaaaatgaaaggcatttatgcagcattgacaactttggttgttacattgattgtggctttatttgtatttgaattaccagcgcgtgtatcagcaggtgcgattacagaaggcgttgttgccggtattttcccaataggatatatcgttttaatggcagtttggttatataaagtttctattaaaacaggacaattttctattattcaagatagtattgcaagtatttcagaggaccaaagaatccaactattattaattggattttgtttcaacgcatttttagaaggtgcagcaggatttggtgtgccaattgcgatttgtgcagtattattaattcaacttggatttgaaccattaaaagcagcgatgttatgcttaattgctaatggtgcggcgggtgcctttggtgcaattggtttaccagttagtattattgatacgtttaacttaagtggaggcgttacaacattagatgttgcgagatactcagcattaacacttccaattttaaactttattattccatttgttttagtattcattgtagatggtatgaaaggtattaaagaaattttacctgtcattttaacagtgagtggtacatatactggattacaattattattaacaatattccatggtccagaactagcagacattatcccatcactagcaacaatggtggtgttagcatttgtttgtcgtaaatttaaaccgaaaaacattttcagattggaagcgtctgaacataaaattcaaaaacgaacgcctaaagaaattgtctttgcttggagtccgttcgtcattttaacggcctttgtattagtatggagtgcaccattcttcaaaaaattattccaacctggaggtgcacttgaaagtttagtactaaaaatgccaattccgaatactgtgagtgatctatcgcctaaaggcattgcgttgcgtctagatttaattggagcaactggaacagcgattttactaacagtgattattacaattttaattacgaagttaaaatggaaaagtgcaggcgccttattggtcgaagcaattaaagaattatggttaccgatccttacaatttcagctatcttagctattgctaaagttatgacatacggtggtttgactgtagcaattggacaaggtattgctaaagcgggagcaattttcccattattctctccagtattaggttggattggtgtgtttatgactggttcagttgtaaataacaatactttattcgcacctattcaagcgacagtggcacaacaaatttcaacaagcggttcattacttgtggcagctaacactgcaggtggtgtagcagcgaaacttatttcaccacaatcaattgccattgcgactgcagccgttaaaaaagttggtgaagaatctgcattattaaaaatgacgttaaaatacagtattatatttgttgcctttatttgtgtttggacgtttatactaacgttaatattctaaatataaataatgttgtcacttggattcaaatgacattttaaatctaattattcatgaatcgaactagtacgaaatgcaatgagcatcttgtctagttcgattttttaatgtctaaaaatgtcgtatatgtaattagagtagaaagtgttgaggcgtttcagaagttgtttagaaaagtaagtaaaaaaaatgcactgagcaacaaaagatgttgctagtgcatttagatgattcttatcatttcaaataagaatgtgttaatcaacgtatataagttaaaattggtttggataaaatgatatctatcgttgtgtattgtttgtttttatagttcgcgacgacgtccagctaataacgctgcacctaacgctaatgataatccaccaaatacagttgtaccgatgaatggattttcttcaccagtttctggtaatgcttgagctttgttagcatctgcatggtttgctggttgcttcttatcaacaacaagttcttgaccaggtttgatcatgtttttatcagctaatttgttatctgcagcaattttgtcagcagtagtgccgtttgcttttgcaatgtcatttactgtatcaccaggtttaacgacatgtactccgttgccatcttctttaccaggcttgttgccgtcttctttgccaggtttgttgttgtcttctttgccaggtttgttgccgtcttctttaccaggcttgttgccgtcttctttgccaggtttgttgttgtcttctttaccaggcttgttattgtcttcctcttttggtgcttgagcatcgtttagctttttagcttctgctaaaatttctttgctcactgaagggtcgtcttttaaggctttggatgaagccgttacgttgttcttcgtttaagttaggtaaatgtaagatttcatagaaagcattttgttgttctttgttgaaattgttgtcagctttcggtgcttgagattcatttaactttttagcttctgctaaaaggttagcactttgacttgggtcatcttttaagctttggatgaaaccattgcgttgttcttcgtttaggttaggcatgttcaagatttcatagaaagcattttgttgttctttgttgaaattgttgtcagctttcggtgcttgagattcatttaattttttagcttcacctaaaacgttagtgctttggcttggatcgtctttaagactttgaatgaaaccattgcgttgcgcttcgtttaagttaggcatgttcaaaatttcatagaaggcgctttgttgatctttgttgaagttattttgttgcgcatcagcttttggagcttgagagtcattaagttttttagcttcacctaaaacgttagcactttggcttggatcatctttaaggctttggataaaaccattacgttgatcagcgtttaagttaggcatatttaacacttgataaaaagcattttgttgagcttcatcgtgttgcgcagcatttgcagcaggtgttacgccaccagatataagtaaagtacctaaagttacagatgcaatacctacacctagtttacgaattgaataaatgtttttctttttcaaattaataccccctgtatgtatttgtaaagtcatcataatataacgaattatgtattgcaatactaaaaactatatttataattaaatttaaatgtaagttttacaacttataaaataaaaattttgttcaaagatttattcaggaagtaaaaggcttaaaaccgcaaaatcacgctatttcgattaataaaaacagataaaatatagagatactttttataatgaaagcggtttaatacatatgagttaaaaaatatttttaagaataaagtggggctttgaatgtgctgaggtttaatttcggaaatggttttaagagatatagaaaatagaaagttgttcataatgtgctgaggttttattaaaaaatagaaaacacaagtgcactttagaatacagcacacttgcgtaatagagatattattcaaaaacaagatgtaaatgatctttatctgctaataattgattcacttgagctaataattgttcagcatggtcttgctgcgcgtcattcatatgaattaaaatttttctttcatcttcagttgagcgttcttttattagatagccttgcttttttaaattattgagagctctaacagtttgagggtatttatggtggattgtttcaattaaatctttaagaagaacgatgtttttattttgagaagtgataatagctagaattgtgaattctacaaaacttaatgttatatgctttttgataatattcttgaaatacattgtatacatcatcaagtttagaaattctttactatcttttggtatcatctgtgattcactttgatctgcaaggttaaattgtttaatgatttgatcaaacaatttaacacgttctgcaattttctctcgttgttcttcagatattgaaatgtaagtattacgctcgtcaattttacttcgaactttactaatatatgaatgtttcacaagtacttttatatgctgtactaaatccgattgtttataacataaatctgaaacaatcttcttaaatggaagtgtgttttcttgctgatgaaataaataagtcagtaatataaattcttttatagtcatatcgacttcaggcttgacttttttcttaaaacgaaacatatatgcttcaatgattataaaatctctaattttgtcatggttattatatttcattgttttatctccttgtatatgcactttattttaatataacacaatataataagaaaaaaatccataatttacaattaaaaataatatgatatttttattaaaatttgtgtttttgaataaatgacattatcaaacactatatttaaataagaaatagttatcgatatttgaaaaatcgaagaatattgattgatattatagaatatgagtcggtgttatttgtatataaagtattaatatgtaattaagaaagtcgacgcttgttaacaataacgacaactatatgtataaaaaaacctcgcaactgttagttagctgaatcattttgctaacgttgttgtgaggtcattttgttttaataatatcgttataactttttcacggttaataataagtatatgaagaatggggcaccaaaagcagcaataaatacacctgctggcacttctttaggcaagaataaggtacgcccaattaagtctgcaataacaattgatatggcaccaatcattgctgacattagtaactttttagcataacttccgcgaacgattgttttcgcgatatgtggtgcgattaaaccgacaaacccaatgttacctactaaactgattgccatagatacgagtatagtagaagtgattaattggattagtttcatacgttgtacatgtaagcctaagccaatcgctacagggtcatcaagtatagatattttcatttttggtataacaagaaataacaacggcacaacagctaaaataaccatacccaaaatgattgtatctttaaacgtagcaccgtaaagacttccgactagccatgtataagctttggcagcagataattgcttcgttgtaatgagtaatccttggacaagcgcaataaacaacgtttgcatcgaaataccgatgattatgagtgttgtcgggcgtatttgtcctttcgtttgaaacactaatagtatcatcattgcaactgcgccacctaatactgcaaatagtggaagtaaatgtatcgttaaatggctgaaaaatgcaataaagacaacagcacttaagctagcaccacctgtgattccgataatatctggtgaggcaattggatttttcaatacattttgtaacattaaaccactcatccctagtgcggcaccagctaatatcgcaagtgtaatgcgaggtaagcgtaatacttctaaagtgaattgatctatactgtcatttggatttataaagtacatcagtacgcgttgtaatggtataaagcttgaaccaatcatcatacttaccactgaaacgatggctaaaaagattaacgcgaagatgagatggtaattgtcttttttattaatcttttcggtcataagcgttgacgtcctttcttcataatatagattaagacaatagcgccaatgacagcggtaacgacaccgataggcaactctagtggcttaattattatacgagcaacaatgtctgaaatgatcattaggattgctccagctaatgcagtaaaaggaattaaatacttatagtttggtggcaataatcgtttactaatattcggtacgataagacccacaaagacgattgatccagctactgctaccgaaataccggctaacatactgatgagcataataatcatccatttgattaattttatgttttgaccgaggccggttgcaatgtcgtcacttgtcatcaagatgttgatgtgtgcagccatgctaaatgcaattaaaataagtatcaatacaagcggaataatccatgggatatcccaaatgttacgtaatgaaacggagccactcaaccaaaataataggccttgtaagtctgtttcgttcataataagtatgccttgagtaaaggctgtaaatagcatcgcaatcgcagcacctgccaaaatgacgcgatgaggtgaaaatagggtttgtctaaacatacctagtgcaacgactaagactgtaacaacaatagcccccaaaaatgcgatgacaacaatcattttaaaagattgaatttggataaatgtaatactaaagatgacaaaaaatactgcgcctgcattgacaccgaaaagccctggtgatgctattgggtttcgtgtaagtgcttgcatcaacaaacctgagacagcaagggcagcaccagtcaataacgcaatgattgttctcgacgcccgtgcaccagtgacaacatcatgtaaatcgttttcactatcaaagttgaataacgcctgtatcaccgtacctggtgacacaagcgtatttccaatcattaaacttaagatagctactattgcaagacataaaccagcaataacgatttggtattttggtttaagtagcatcgtaaaactccttaattattttgattgtttttcaatatttaacttttcatataaatcgtcaataagttttaatgatgatttatatccgccagctaagttccaagtgatttcatctaaatcatcagatacttggttgtttttaactgcgtctaaatttttccactctttacttgaagtccattcgctttcagtctttttaactaatgcagcatctttcgcatttggatctgattttactacaaaaatatgatcagcgttcattaatggaatgctttctttagatgtaagttggataatatctttaccattatcaacttgtttttgtaagtctttattacgtttgaatcctaaatcatttaagatttcaccagcatatccaccagcataaattcttgtatgatcagcacggaagttaacaactgaagctttcaatggccatgcatctttatactttgcttttgcatctttttggaatgcagctactttatcatcgtactttttaagtaaatcttcagcttctttttctttccctaaagctttccccattaacttagttgtatctttgaatttgaaaactgtatcagtagaaactgttggtgcgattttagataattgatcgtaaactttttcatttctaacttttgacgcgacaattaagtccggttttaatttagagatttcctctaagttaggcgcaggttcttgacctacaatcttagtatcttttaaatcattttttatgtattcgaatttcggtttttgtgtccatgattctacagcacctacaggtttaacacctaaagatacagcgacgtcagtggcaccttgatatagcgtaacaacacgctttggtttccctttaatttcagttgtacccattgcatgtttaattgaagttgtttccttatctttgttatcagatgattgtttatttgaattcccactacatcctgctaaaacaagtaggaaagcaagcgtaacaacaagcattttaattactttattcattgactaattagcctccttcgtgatgtatgacaatgagaatcattatcacgatttagtatgaattaaattttttcctaagtcaataaaatatttatgatttacatgcaacttataattatttgacatataaatgcataaaaaatataatcctaattacttgatagtgagaatcattatcaattaggtaacacacaatattatagaattttaaatttgaggaggaagcgcttttgattgaaaaaagtcaagcatgtcacgattcattgttagattctgtagggcaaacacctatggttcaacttcatcaactatttccgaaacatgaagtgtttgcaaagttagagtatatgaatcctggaggcagcatgaaagatcgacctgccaagtacatcattgaacatggtattaaacatggtttaatcactgagaatacacatttaattgaaagtacttctggtaatttaggcattgcgttggcaatgatagctaaaatcaagggattaaaactcacgtgtgttgttgatcctaaaatatcaccaacaaatttgaaaattattaaaagttatggtgccaatgtagaaatggttgaagaacctgatgcacatgggggttatttaatgactcgtattgcaaaggtgcaagaactgttagccactattgacgatgcatattggattaatcaatatgcgaatgagttaaattggcaatcccattatcatggtgcaggcacagagattgttgaaacaattaagcaacctatagattattttgtcgcgccagtcagcacgacaggtagcattatgggtatgagtagaaaaataaaagaagtgcatccaaacgcacaaattgttgctgttgatgcgaaagggtcagtcatttttggtgacaaacctattaatagagaattacctggtatcggtgctagtcgtgtacccgaaatattgaatagatcagaaattaatcaagtgatccatgtagatgattaccaatctgctttgggctgtcgaaaactgattgattatgaagccatatttgctggaggttcaacaggttcgattattgcagcgattgagcagttgataacgtcaattgaagaaggtgcaacaattgtcacgattttaccagatcgaggcgatcgttacttagatttagtttattcagatacatggttagaaaaaatgaaatcaagacaaggagttaaatcagaatgaatagagagatgttgtatttaaatagatcagatattgaacaagcgggaggaaatcattcacaagtttatgtggacgcattaacagaagcattaacagcgcatgctcacaatgattttgtacaaccgcttaagccgtatttaagacaggatcctgaaaatggacacatcgcagatcgaattattgcaatgccaagtcatatcggtggtgaacacgcaatttcaggtattaagtggataggtagtaagcacgacaatccatcgaaacgtaatatggagcgtgcaagtggtgtcattattttgaatgatccagaaacgaattatccaattgcagttatggaagcaagtttaattagtagtatgcgtactgcagcagtttcagtgattgcagctaagcatttggctaaaaaaggatttaaagacttaacaatcattggatgcgggctaatcggagacaagcaattacaaagtatgttagagcaattcgatcatattgaacgcgtgtttgtttacgatcaattctctgaagcatgtgcacgctttgttgatagatggcaacaacagcgtccggaaattaattttattgcgacagaaaatgctaaagaagcagtatcaaatggtgaagtagtcattacatgtaccgtaacggatcaaccatacattgaatatgattggttacaaaagggtgcatttattagcaacatttctatcatggatgtgcataaagaagtctttgttaaagctgacaaagtcgtagtagatgactggtcacaatgtaatcgagaaaagaaaactattaaccaattggtgttagaaggtaaattcagcaaagaagcacttcatgctgaactaggacaacttgtgacaggtgacataccaggacgtgaagacgatgatgaaatcatattacttaatccgatgggtatggctatcgaagatatttcaagtgcttactttatttatcaacaggcacaacaacaaaatattgggacaacattgaacctatattaagaatgcgaggtgtctgaacattgcagaatcatacagcagtcaatacagcacaaacgataatattaagggatttagttgatgcattattatttgaagatatagccggtattgtatcgaatagtgagattactaaagaaaatggacaaaccattttgatatacaaacgtgaaacacaacaaataaagatacctgtttattttagtgctttaaatatgtttcgttatgaaagttcacaaccaattacgatagagggaaggctgtctaagcaacctttaacggcagctgaattttggcaaacaatcgtcaaaatgaatcgtgatttaagtcatgaatgggaagtggctcgcgttgaagaaggactgactactgctgccacacagcttactaaacaattatcagaattagatttagcgtctcatccttttgtgatgtccgaacagtttgcaagtttaaaagatcgtccatttcatccattagctaaagaaaaaagaggattaagagaagcggattatcaagtgtatcaagctgaattaaatcaatcatttcctttaatggttgcagcagttaaaaagacacatatgattcatggcgatactgcaaatatcgatgaattagaatcattgacagcacctataaaagaacaagcgacagacatgttaaatgatcaagggttatcaatagatgactatgtactatttccggtacatccttggcaatatcaacatattctgccgaacgtctttgcgaaagagattagtgaaaaattggttgtactattaccgttaaaatttggagattatctgtcgtcttcaagtatgcgttcattaattgatattggcgcaccgtataaccatgtcaaagtaccatttgcaatgcagtcattaggtgcattaaggctaacgcctacgcgttacatgaaaaacggagaacaagcagaacaattattacgtcagcttatagaaaaagatgaagcactagctaagtatgtcatggtttgtgatgaaacagcttggtggtcatatatgggtcaagataatgatattttcaaagatcaattaggtcatttaactgttcagctaagaaaatatcccgaagtgctagccaaaaatgatacgcaacagctagtgtcaatggcagcactcgcggcaaatgatcgcaccttatatcaaatgatttgtggaaaagataatatttctaaaaatgatgtcatgacgttatttgaagatatcgcacaagtctttttaaaggtaacactatcatttatgcaatacggcgcattaccagagttgcatggtcaaaatatattgttgtcatttgaagatggacgtgtacaaaaatgcgtgttacgtgatcatgatactgtcagaatttataaaccatggctaacagcacatcagctttcattgccgaagtatgtcgtcagagaagatacacctaatacgctaattaatgaagatttggaaacattctttgcttattttcaaacattagctgtatcggtaaatctatatgccattattgatgcaattcaagatttatttggtgtaagtgagcatgaacttatgtcgttgttaaaacaaattttaaaaaatgaagtggcaactatttcctgggttacaactgatcagctagctgtcagacacattctatttgataaacagacgtggccatttaaacaaattttattaccattgctatatcaacgtgatagtggtggaggtagtatgccttcaggtttaactaccgtaccaaatccaatggtgacatatgattaatcagactatatggcgcagtaactttcgcattttatggctcagtcagtttatagcgattgctggactgacagtacttgtgccattattgccaatttatatggcatcactacaaaatctatcagtcgtagaaatacagttgtggagtggtatagcgattgctgctccagctgtaacgacgatgatagcttcgccgatatgggggaagctaggtgataagatcagccgaaaatggatggtgttaagagcgttacttggtttggcggtatgcttatttttaatggcattgtgtactacaccattacagtttgtacttgtgaggttattgcagggactatttggtggtgttgttgatgcatcaagtgcgtttgcgagtgcagaggcgccagctgaagatcgtggaaaggtattaggaagattacaaagttcagtcagtgcagggtctcttgtaggaccattaatcggcggtgttacagcttcgatattaggttttagtgcgttactgatgagtattgccgtcattacttttattgtctgtattttcggtgcattaaaattgattgaaacgacacatatgccaaaatcacaaacaccaaatattaataaaggtattcgccgttcatttcaatgtctattatgcacacaacaaacgtgtcgatttattatcgttggcgttttagcaaactttgctatgtatggcatgctaactgcattatcaccacttgcttcatcagtgaatcatacagcgatagatgaccgtagtgtgattggatttttacagtccgcattttggacggcttcgatattaagcgcgcctttatggggtcgctttaatgataaatcatatgttaaatcagtatatatatttgccacgattgcatgtggttgtagtgcgatactgcaaggtttagcgacgaatatagagtttttaatggctgcaagaatacttcaaggattaacatatagtgcattgattcaaagtgtcatgtttgttgttgtgaatgcttgtcatcagcaacttaaaggcacatttgttggaacgacgaacagtatgttagttgttggtcaaattattggcagtcttagtggcgctgccattactagttatactacaccagctactacatttatcattatgggcgtagtatttgcagtaagtagtttatttttaatttgttcaaccatcactaatcaaatcaacgatcacacattaatgaaattatgggagttgaaacaaaaaagtgcaaaataaagaattaatacaacatgcagcgtatgcggctatcgaacgcattttaaatgaatattttagagaagaaaatttatatcaagtaccacctcaaaatcatcaatggtctatacaattatctgagctcgaaacgttaacaggtcaattcgcttattggtctgcgatggggcatcatatgtatcatccagaagtatggcttattgatggtaaaagtaagaaattaacaacatataaagaagccattgcgcgtattttacaacatatggctcaaagtgcagataatcaaacggcagtgcaacaacatatggcgcaaattatgtctgacatcgataatagcattcatcgcacggcgcgttatttgcaaagtaacacaatagactacgcagaggatcgctatatcgtttcagaacaatctttatatttaggtcatccatttcatccgactcctaagagtgcaagtgggttttcagaagcagatttagagaaatatgcacccgaatgtcatacgtcattccaattgcattatttagctgtgcatcaagatgttctgctcacgcgctatgtagaaggtaaagaagatcaggttgagaaagtgttgtatcaattagcagatatagacatatcagagatacctaaagattttattttattaccaatacatccttatcaaataaatgtgttgcgacagcatccacagtatatgcaatatagtgaacaaggtttaataaaagaccttggtgtttccggtgattcagtgtacccgacgtcttcggttagaactgtattttcaaaagcattaaacatttatttgaaattaccgatacatgttaaaattactaattttatacgtacgaatgaccttgaacaaattgaacggacaatcgatgccgcacaagttatcgcatcagtcaaagatgaggttgaaacaccccattttaaattgatgtttgaagaaggatatcgtgcattgttaccgaatccattagggcaaacagttgaacctgaaatggatttattaacaaatagtgccatgattgttcgtgaagggataccgaattaccatgctgataaagatattcatgtattggcgtcattatttgaaacgatgcctgattcaccgatgtctaagttatcacaagtgattgagcaaagtggtttagcaccagaagcatggcttgaatgttatttggatcgtacattattgccgatattaaagctgtttagtaacacaggcattagtctagaagcacatgtacaaaatacattaattgaattaaaagatggcatacccgacgtatgctttgtcagagatcttgaaggcatttgtctatctagaacgattgctactgaaaaacaacttgtgccaaatgttgtggcagcatcaagccctgttgtatatgcacatgatgaagcatggcatcgtcttaaatattacgttgtagtaaatcacttaggacatttagtatcaactattggtaaagcgactagaaatgaagttgtgttatggcaacttgtagcgcatcgtcttatgacttggaaaaaagaatgcgcgaataacgcagtatttgttgactgtgtagaagatttatatcaaacgccgaccattgcggctaaagcgaatttgatgagtaaattgaatgattgtggtgcaaaccctatttatacacatataccaaatccaatttgtcataacaaggaggtatcgtattgtgaatcaaacaattcttaatcgtgtaaagactagagtgatgcaccaactggtatcatcgcttatttatgagaatattgttgtgtataaagcgtcatatcaagacggtgtcggtcattttacaatagaaggacatgattcagagtatcgttttactgctgaaaagacacatagctttgatcgtatacgtatcacatcaccaattgagcgtgtcgtaggagatgaggcagatacaacaacagactatacacaattactgagagaggttgtatttacatttcctaaaaatgatgaaaagctagaacaatttattgtcgagttattacagacagaactaaaagatacgcaaagtatgcagtatcgagaatcaaacccaccagcaacacctgagacatttaacgactatgaattttatgcgatggaagggcataagtatcatccaagttacaaatcacgtttaggatttacgttgagtgataatttgaaatttggtcctgactttgtaccaaacgttaaactgcaatggttagctatcgacaaagataaagtagaaacgacggtatcaagtaatgttgtagttaacgaaatgttacgtaaacaagttggcgataagacttatgaacattttgtacagcaaattgaagcgtctggcaaacatgtaaatgatgttgagatgatacctgtacacccatggcagtttgaacatgtcattcaagttgatttggctgaagaaaggcttaatggcacagtactatggttaggggaaagtgatgagctatatcaccctcaacaatcgattcgtacgatgtcgccaatagacacgacaaaatattatttaaaggtaccaataagtataacgaatacttcaacgaaacgagtgttggcgcctcatacaattgaaaatgcagcgcaaattacggattggttaaagcagatacagcaacaagatacgtatttaaaagatgaattaaagacagcttttctaggtgaagtcttaggacagtcttatttaaatacacaactttcgccttataaacaaactcaagtttatggtgcgttaggtgttatatggcgtgaaaatatatatcatatgttaatcgatgaagaggatgcgataccatttaatgcactttatgcgagtgataaggatggtgtaccattcattgaaaattggattaaacaatatggttctgaagcttggacaaagcaatttttagctgtagcgattcgtccaatgattcatatgctttattatcacggtattgcttttgaatcgcatgcacaaaatatgatgcttattcatgaaaatggttggcctacacgtattgccttaaaagatttccatgatggtgttcgttttaagcgtgagcatttaagtgaagctgcttcacacctgacattaaagccaatgccagaagcacataaaaaagtgaatagtaattcatttattgaaacagatgatgaacgtttagtacgcgactttttacatgatgcatttttctttattaatatcgccgaaatcatcttatttattgaaaagcaatatggtatcgatgaggagctgcaatggaaatgggttaaaggcatcatcgaggcgtatcaagaagcatttccagagttgaataactatcaacatttcgatttgtttgaacctacgattcaagttgaaaagttaacgacacgtcgattattaagtgactccgagttaagaattcatcatgttacaaatccattaggtgtaggaggtattactgatgcaacaactatctctgaaacatagattaaacaatggtgattcagtttatggcatttttaattctataccggacccattaatgatagaggttatcgcagcaagcgggtatgactttgttgtgattgatacagaacacgtggcgattaatgatgagacactagcgcatttaattcgtgcagctgaagcagcgcatattataccaattgtacgtgtcactgcagtgatagatagagatatcattaaagtgttggatatgggtgcgagaggtattattgtgccacacgttaaagatcgtgagacagttgagcatattgtgaaattaagtcgttattacccgcaaggattaagaagtttgaatggtggtcgcatggcaagatttggacgtacaccattacttgatgcaatggagatggctaatgagcatattatggtgattgccatgatagaagatgttgaaggggttatggccattgatgatatagcacaagtcgaaggtttagacatgatagtcgaaggtgccgcagatttatcccagtcactgggcataccatggcaaacgcgtgatgatcaagtaacatcacatgttcaacatatttttgaagttgtgaatgcacatggtaaacatttttgtgcattaccacgtgaagatgaagatattgcaaaatggcaggcacaaggtgtacaaacatttattttaggtgatgatcgtggaaaaatatatcgccatttaagtgcatctctagcgacgtctaaacagaagggggatgaagactaatgcgtatagttcaacccgttattgaacaattaaaagcacaatctcatccagtttgtcattatatctatgatttagtcggactggaacatcatttgcaacatattacatcgtcattgcctagtaattgtcagatgtactatgcaatgaaagcaaatagtgaacgaacaatactagatacaattagtcagtatgttgaaggattcgaagttgcatctcaaggtgaaatagcaaaaggtcttgcttttaaaccagcaaatcatattatttttggtggccctggtaagacagacgaggaactaagatatgcagtaagtgaaggtgttcagcgtattcatgttgaaagtatgcatgaattacaacggctaaatgccatcttagaagatgaagataagacacaacacattttattgcgtgttaatttagcaggaccatttcccaatgcaacgttgcatatggcaggacgcccaacacaatttggtatttctgaagacgaagttgatgatgtcattgaagctgcgctagcaatgccaaatattcatttagatggatttcattttcattctatttctaacaatttagactcgaatttacatgtcgatgtagtgacactttattttaaaaaagcaaaggcatggtctgaaaaacatcaatttcctctcaaacatatcaatcttggtggtggcataggcgttaactatgcagatttaactagccaatttgagtgggataattttgtagaaaattttaaaacacttatcgttgagcaagaaatggaagatgtgacattgaactttgaatgtgggcgctttattgtggcacatattggttactatgtgacagaagtgctagatattaagaaagtacatggtgcttggtatgccattttaagaggaggtacgcaacaatttagactgccggtatcttggcagcataaccatccttttgacatttatcgctataaggacaatccatattcatttgaaaaagtttcaatttcgaggcaggacacaacgttagtcggtcaattatgtacaccgaaagatgtctttgctagagaagtacagatagatgcaatcagtacaggcgacgttattgttttcaaatatgcaggtgcatacggatggtctatttcacatcacgatttcttaagccatctacatcctgaatttatttatttaacgcaaacaaaggaggatgaataactattgaatcatattcatgaacatttaaaattggtaccagtagataagattgatcttcacgaaacattcgaacctttaagattggaaaagacgaaaagtagtattgaagcagatgattttatacgtcatcctattttagtgacagcgatgcaacatggtagatatatggttatagatggtgtgcatcggtatacaagtttgaaggcgttaggatgtaagaaagttccagtgcaagaaatccatgaaacacaatattcaattagtacatggcaacataaagttccatttggtgtgtggtgggaaacgttacaacaagaacatcgcttgccatggactactgagacaagacaagaagcgccatttattacgatgtgtcatggtgatacagaacaatatttgtatacaaaagatttaggcgaagcacattttcaagtatgggaaaaggttgtcgcaagttatagtggttgttgttctgtagagagaattgcacaaggtacatatccttgtctttctcaacaagatgtactcatgaagtatcagccattgagttataaggaaattgaagcggttgttcataaaggggaaactgtgccagcaggtgtgacacgctttaatgtttcaggacgatgtcttaatcttcaagtaccactggcattacttaaacaagatgatgatgttgaacaactgcgcaattggaagcagtttttagcagataagtttgccaatatgagatgctatactgaaaaagtatacttggtggagcaatagttttactgtgatgttgagagaaatatgatgatttagcgtattgatagcgaaaatataataaacaatatagtgtggagaacttttgatattttataaatattaaagttctccatttttgtattttgcatataaaaattaaataaaataaggtatattaaggtaaagtataaattttaaataaatggggaatgagtatgaatatggatttaattataggaagaatcgctatttggataggcatcgcagtgcaaatgtattataacgtcgtcattgttagcatgacaacctttatcatttttataaatgctgaaggagcaagccctgaaatagctgttttaatagcattagtaatcattcttatcttaactttaccacctatcctaaccgcgattaacttagagaataaaatggaagtaaaaggtacgctttttattgtttatgcgattgtggcattttgtatgtttaattacctttcatcaatgttatgggtggcttgcggcatttttcttatttggactaaatattcaaaagatgggtcaacaggtaagaatgagaatgaaaaagttgatattgaaagtacagagaatcaatttgaatctaaagataaaattactaaagaataaagtgaatatttaaggcggagtataaatattaaataaatggggaatgagcatgaggaaaaatatagaattgatattaatatggatgggtatatatattcaaatagcatacatggctattatagctttgctcatatatatatttacattattttttggatcattttttggatttttatttttgttaacaggtaatgaaattggagatttattaaaaacacccacttcatttatgatatttgctacatgtctaattatattttcagtcttacctgttactgtactagcatttgacttatctaaaagaagaattttaaaaggtatcatattagttgtatatgcgattattgctgcgttattatacaactttgtatctgcaatactttggtttattgtagccatttctctttttattagaaaaaaatctttatctgcagaaaatactgttgctgttcaaagtcacaaaggagcttctaaacaagaaatacgttataaacttgtgtacaagtctgtctcgataaaacatagtgatgattcaattaaagtagcacatacagtgggaaataaaaaactaattgatgacaaaacaattgatattcaccttgattcaagtgaaatattaaaaaagattagtactgacgcaaatcaagcatcacataaagacacgtgtaaaaaggaacttgatagtcaagacatgatagaacatcctgagtttaaaaatcccacgactaaaaacctagaaggattaaacgaagaagtacataaagatgaagctacaactaaagttgacagtgataatacggaatcgccgattgaatcaaaagaccatgtctcgaaaaaagattgatgataaactaatcgagagacttaaaaaaataatattcaacataagcacttttaaaacgacatttaaacgcattgccaatcactaatggtagtgcgtttaactatactttaaatatctgaatattttgttaaatggagttacctttgttgtactattcaaatgaagaggagtaaaatgtaattaaaggaaagtaatttgaggagtgatctttatgacaaacaacaaagtagcattagtaactggcggagcacaagggattggttttaaaattgcagaacgtttagtggaagatggtttcaaagtagcagttgttgatttcaatgaagaaggggcaaaagcagctgcacttaaattatcaagtgatggtacaaaagctattgctatcaaagcagatgtatcaaaccgtgatgatgtatttaatgcagtaagacaaactgcagctcaatttggcgatttccatgtcatggttaacaatgccggccttggaccaacaacaccaatcgatacaattactgaagaacagtttaaaacagtatatggcgtgaacgttgcaggtgtgctatggggtattcaagccgcacatgaacaatttaaaaaattcaatcatggcggtaaaattatcaatgcaacatctcaagcaggcgttgagggtaacccaggcttgtctttatattgcagtacaaaattcgcagtgcgaggtttaacacaagtagccgcacaagatttagcgtctgaaggtattactgtgaatgcattcgcacctggtatcgttcaaacaccaatgatggaaagtatcgcagtggcaacagccgaagaagcaggtaaacctgaagcatggggctgggaacaatttacaagtcagattgctttgggcagagtttctcaaccagaagatgtttcaaatgtagtgagcttcttagctggtaaagactctgattacattactggacaaacaattattgtagatggtggtatgagattccgttaataatcatccactaatgataaataaatccttattgttaagtttaatcacttagcagtaaggattttttagtgcacttagaagggattgtattggtagaaaattaataaccgaagttcttaagtgagttatgatgtcactgtctaatgcatcagttgaaagcattactaaattccacctagcatagttacgctgaaacatcacaaaaaccccactatctaatttatctcaataaaaattcacgaagttatctcattttatttttataaataaaaaatatcgataaaaagcttacaatattttatgtttttatgatatatttttaatgtataaaagaggtggaagatttggaaagagttttgataactggtggggctggttttattgggtcgcatttagtagatgatttacaacaagattatgatgtttatgttctagataactatagaacaggtaaacgagaaaatattaaaagtttggctgacgatcatgtgtttgaattagatattcgtgaatatgatgcagttgaacaaatcatgaagacatatcaatttgattatgttattcatttagcagcattagttagtgttgctgagtcggttgagaaacctatcttatctcaggaaataaacgtcgtagcaacattaagattgttagaaatcattaaaaaatataatagtcatataaaacgttttatctttgcttcgtcagcagctgtttatggtgatcttcctgatttacctaaaagtgatcaatcattaatcttaccattatcaccatatgcaatagataaatattacggcgaacggacgacattaaattattgctcgttatataacataccaacagcggttgttaaattttttaatgtatttgggccaagacaggaccctaagtcacaatattcaggtgtgatttcaaagatgttcgattcatttgagcataacaagccatttacattttttggtgacggactgcaaactagagattttgtatatgtatatgatgttgttcaatctgtacgcttaattatggaacacaaagatgcaattggacacggttataacattggtacaggcacttttactaatttattagaggtttatcgtattattggtgaattatatggaaaatcagtcgagcatgaatttaaagaagcacgaaaaggagatattaagcattcttatgcagatatttctaacttaaaggcattaggatttgttcctaaatatacagtagaaacaggtttaaaggattactttaattttgaggtagatactattgaagaagttacagctaaagaagtggaaatgtcataaaaataacattgaagatgttcatataaataaaaattataattatcaaagaaaattagatgcactcgaagaagtgagaaaaggctattacccaattaaacgtgcgattgacttagtattaagtatcgttttattatgtttaacatttccgattatgttcatattcgccattgctattgtcatagattcgccaggaaatcctatttatagtcaggttagagttgggaagatgggtaaattaattaaaatatacaaattacgttcgatgtgtaaaaacgcagagaaaaatggtgcgcaatgggctgataaagatgatgatcgtataacaaatgtcgggaagtttattcgtaaaacacgcattgatgaattaccacaactaattaatgttgttaaaggggaaatgagttttattggaccacgcccggaacgtccggaatttgtagaattatttagttcagaagtgataggtttcgagcaaagatgtcttgttacaccagggttaacaggacttgcgcaaattcaaggtggatatgacttaacaccgcaacaaaaactgaaatatgacatgaaatatatacataaaggtagtttaatgatggaactatatatatcaattagaacattgatggttgttattacaggggaaggctcaaggtagtcttaatttacttaataagttcaaataaaagttacattttaaagattgtgaccaattgttacagtataacgaggaatcccttgagacagtatcaaatggcattaagaaatatgtgccatcattgatttgtatggctataaatactattcatctgatgagatagccatgttaagaaattgaaagtatagcgttaaaggggtttgtaacagttgaaaattatatattgtattactaaagcagacaatggtggtgcacaaacacatctcattcaactcgccaaccatttttgcgtacaccatgatgtttatgtcattgtaggcaatcatggaccaatgattgaacaactagatgcaagagttaatgtaattattatcgaacatttagtaggtccaattgactttaaacaagatattttagctgtcaaagtgttagcacagttattctcgaaaattaaacctgatgttatccatttacattcttccaaagctggaacggtcggacgaattgcgaagttcatttcgaaatcgaaagacacacgtgtagtttttactgcgcatggatgggcttttacagagggtgttaaaccagctaaaaaatttctatatctagttatcgaaaaattaatgtcacgtattacagatagcattatttgtgtttcagatttcgataaacagttagcgttaaaatatcgatttaatcgattgaaattaaccacaatacataatggtattgcagatgttcccgctgttaagcaaacgctaaaaagccaatcacataacaatattggcgaagtagttggaatgttgcctaataagcaagatttacagattaatgccccgacaaagcatcaatttgttatgattgcaagatttgcttatccaaaattgccacaaaatctaatcgcggcaatagagatattgaaattacataacagtaatcatgcgcattttacatttataggcgatggacctacattaaatgattgtcagcaacaagttgtacaagctgggttagaaaatgatgtcacatttttgggcaatgtcattaatgcgagtcatttattatcacaatacgatacgtttattttaataagtaagcatgaaggtttgccaattagcattatagaagctatggctacaggtttgcctgttatagccagtcatgttggcggtatttcagaattagtaactgataatggtatatgtatgatgaacaaccaacccgaaactattgccaaagtcctggaaaaatatttaatagacagtgattacatcaaaatgagtaatcaatctagaaaacgttatttagaatgttttacagaggagaaaatgattaaagaagtggaagacgtttataatggaaaatcaacacaatagtaaattactaacattgttacttatcggtttagcggtttttattcagcaatcttcggttattgccggtgtgaatgtttctatagctgactttatcacattactaatattagtttatttactgtttttcgctaaccatttattaaaggcaaatcattttttacagtttttcattattttgtatacatatcgtatgattattacgctttgtttactattttttgatgatttgatatttattacggttaaggaagttcttgcatctacagttaaatatgcatttgtagtcatttatttctatttagggatgatcatctttaagttaggtaatagcaagaaagtgatcgttacctcttatattataagcagtgtgactataggtttattttgtattatagccggtttaaacaagtcccctttactaatgaaattgttatactttgatgaaatacgttcaaaaggattaatgaatgaccctaactatttcgcgatgacacagattatcacattggtacttgcttacaagtatattcataattacatattcaaggttcttgcatgtggcattctgctatggtcattaactacaaccggatctaagactgcgtttatcatattaatcgtcttagccatttatttctttattaaaaagttatttagcagaaatgcggtaagtgttgtgagtatgttagtgattatgctgatattactttgttttaccttttataatatcaactactatttattccaattgagcgatctagatggcttaccatctttagatcgaatggcatcaatttttgaagagggatttgcatcattaaatgatagcggatctgagcgaagtgttgtatggataaatgccatttcagtaattaaatatacactaggttttggtgtcggattagtggattatgtacatattggctcgcaaattaatggtattttacttgttgcccataatacatatttgcaaatttttgcggaatggggcattttattcggtgcgttatttatcatatttatgctttatttactgtttgaattatttagatttaacatttctgggaaaaatgtaacagcaattgttgtaatgttgacgatgctgatttactttttaacagtatcgtttaataactcaagatatgtcgcttttattttaggaattatcgtctttattgttcaatatgaaaagatggaaagggatcgtaatgaagagtgattcactaaaagaaaatattatttatcaagggctataccaattgattaggacgatgacaccactgattacaatacccattatttcacgtgcatttggtcccagtggtgtgggtattgtttcattttctttcaatatcgtgcaatattttttgatgattgcaagtgttggcgttcagttatattttaatagagttatcgccaagtccgttaacgacaaacggcaattgtctcagcagttttgggacatctttgttagtaaattattattgtcgctaacagtttttgcgatgtatatcgctgtgattacaatctttatagatgattactatcttattttcctactacaaggaatctatattataggtgtagcactcgatatttcatggttttatgctggaactgaaaagtttaaaatccctagcctcagtaatattgttgcgtctggtattgtattaagtgtagttgttatctttgtcaaagatcaatcagatttatcattgtatgtatttactattgctattgtgacggtattaaaccaattacctttgtttatctatttaaaacgatacattagctttgtttcggttaattggatacacgtctggcaattgtttcgttcgtcattagcatacttattaccaaatggacagctcaacttatatactagtatttcttgcgttgttcttggtttagtaggcacataccaacaagttggtatcttttctaacgcatttaatattttaacggtcgcaatcataatgattaatacatttgatcttgtaatgattccgcgtattaccaaaatgtctatccagaaatcacatagtttaactaaaacgttagctaataatatgaatattcaattgatattaacagtacctatggtctttggtttaattgcaattatgccatcattttatttatggttctttggtgaggaattcgcatcaactgtcccattgatgaccattttagcgatacttgtattaatcattcctttaaatatgttgataagcaggcaatatttattaatagtgaataaaataagattatataatgcgtcaattactattggtgcggtaatgaatttagtattatgtcttgttttgatatatttttatggaatttacggtgctgctattgcgcgtttaattacagagtttttcttgctcatttggcgatttattgatattactaaaatcaatgtgaagttgaatattgtaagtacgattcaatgtgtcattgctgccgttatgatgtttattgtgcttggtgtggtcaatcattatttgccccctacaatgtacgctacgctgctattaattgcgattggtatagtagtttatcttttattaatgatgactatgaaaaatcaatacgtatggcaaatattgaggcatcttcgacataaaacaatttaagtatcggtaacgctatactttagaaatttaagatgaagaagaaaaggcaatttcttattgaaaaatggaagttgtcttttttaattctttttaaaagcgggaaacaaaagcagttaaatgcctttttgcattcaatattaaatattatatcaatttcgaatatttaaattttatataattggatataacaaataaataataattattgcaaaacacacccgaaattaattattataaaagtatattcataaaaggaggaatatacttatggcatttaaattaccaaatttaccatatgcatatgatgcattggaaccatatatagatcaaagaacaatggagtttcatcacgacaaacatcacaatacgtacgtgacgaaattaaacgcaacagttgaaggaacagagttggagcatcaatcactagcggatatgattgctaacttagacaaggtaccggaagcgatgaggatgtcagtccgtaataatggcggtggtcattttaaccattcattattctgggaaatactatcacctaattctgaagaaaaaggtggcgtaatagacgacattaaagcgcagtggggcactttagatgaatttaaaaatgaatttgcaaataaagcaacaacattatttggatcaggttggacttggttagttgttaatgatggaaaattagaaattgtgacaacgccaaaccaagataatccattaacagaaggcaaaacaccaatcttactatttgatgtttgggagcatgcctactatctgaaatatcaaaataaacgtccagactatatgactgcattttggaatattgttaactggaaaaaagttgatgaattataccaagcagcaaaataatataacttaatataattgaggtggagcatctacaaggtgtttcactttttttgtacttaatatctttacttattcgtttttgtgtaatgggatagcacgtaaaagtggcaaaataataagataaatttcaactcgaaataccttattattgttgactaaaacgatgacctaaatgttatatacatcagacaacactattaattaatcaagatattgtcattaaataaattgacaaaataagtaattattgtgaatctaaagtgaaatttttataaaaaattgtaatgattcaaaaattttgttgcatttcttttgtaatcgtatgataatgtaaatgtaatcaaattgtaatataaggggaaaagacaatgaaaaaattagcaacagtaggttctttaattgtaacaagcactttagtattctcaagtatgccttttcaaaatgcgcatgccgacacaacttcaatgaatgtgtcgaataaacaaagccaaaatgtacaaaatcatcgcccttatggcggagtagtaccacaaggaatgacgcaagcacaatatactgaattagagaaatctttaccccaattaagcgctggcagtaatatgcaagactataatatgaaattgtatgatgcgacgcaaaatattgctgataaatacaatgtgataattacaactaatgtaggggtatttaaaccacatgctgttagagatatgaatggccatgcgttacctttaacaaaagatggcaatttttatcaaacgaatgtagatgcaaatggtgttaatcatggtggtagtgaaatggtgcaaaataaaacaggtcatatgagtcaacaaggccatatgaatcagaacacacacatgaaccaacagccacacatgcaacaaggtcatatgcaatcatcaaaccatcaaatgatgagtccaaaagcaaatatgcattcatcaaatcatcaaatgaaccaaagtaacaaaaaagttttaccagctgctggtgaaagtatgacatcaagtattcttactgcaagtattgccgcactactattagtatctgggttattcttagcatttagacgacgttcaacaaataaataaacataatacgattaataatagaaaaatcgtgtgattatctgagcgagtctaggacataaatcaatgtcctaggctcgctaatgttatattggcagtagttgactgaatgaaattgcgcttgtaacaagcttttccatttcttgcctactccctaagtagtcatcacaaaatttcttatatttcaataattttaataatccgattgtcttatacgtgtcagtgttaattcagatatttcctgtggaatataccacttattaatcataattggataaggtgtttgtgcgtacaatgtttcaataatcagccaacaatgtgtatcaccatcaaacacgtgactatgatttttgaagtggggcgctttggtaatagacatttttaaatctgattgatatgcattgctataaatcgtttgctcaacgaacgtcttcatgtcgtcttcgttttgtgtatttactttaaatgtgtcaatgacatttaacggtataaaggtaaaacaaaatgcatcagcttgcttagaatgattgtcctttttttgataatagcgttccattgcaatgacggcagaaggatggtttgcaaacaaatgatttgtatattcactttctaaatcaacacgataattaattgatgacatagatacgcgagctagcaatatttgatcaagtggatgcttaaattgatccatacttgaagcgtgttgggcatttgtttgtggaataacaaagtgtcccttccctcttgtactctctacgatgccatcttcggctaacaattttatagcttggcgcaaagtcatacgactgacatcaaagcgcgcacaaagttccttttcagtaggtaatgcatggccactcggatattttcctatttgaatttctttatataacgtattataaatcgttaaaaattttggttgtgtttgcgtcacgtagacaacctccataaagttacttaatcactctcatcatacaataatttttactcgaattggaaaaattataaaaattaaacatagataggctttgaaaattagttttatacaaggttagaagctataactgtaaaatgttcttaatattgtcaaaatgtaatgcttgaaagcgcttttaaaaaatattattatatacatggttagacaaatagacaaatcactatacaaatattgggaggaatattttatgaaatcaacaccacacattaaaccaatgaatgacgtcgaaattgcagaaacggttctattgccaggagatccgttaagagctaagttcattgcagaaacatatttggacgatgtggaacagttcaatacagtgcgaaacatgtttggttttaccggaacatataaaggtaaaaaagtttctgtcatgggttcaggaatgggtatgccatctattggcatttactcttatgaattaattcatacatttggttgtaaaaaattaattcgcgttggttcttgtggcgcgatgcaagaaaacattgatttatatgatgtgattattgcacaaggtgcctctactgattcaaattacgttcaacaatatcaattaccaggtcattttgcgccaatttcttcttatcagttattagaaaaagcagttgaaacagcacgtgacaaaggtgtacgtcatcatgtaggtaatgtgttatcaagtgatattttctataacgcggatacaacagcgagtgaacgttggatgcgtatgggtattttaggtgtagaaatggaatcagctgcattatacatgaatgcaatttacgctggtgtcgaagcattaggtgtgttcacagtgagcgatcatttaattcatgaaacgtcaacaacacctgaggaaagggaacgtgcatttacagatatgattgaaattgcactgtcattggtgtagatgattatgaatgttgaatattctaaaataaagaaagcagtacctattttactattcttatttgtattcagtttggttatagacaactcatttaaattgatttctgtagccattgctgatgacttaaatatctctgtaacgacagtaagttggcaagcgacattagccggtttagtaattggtattggcgctgtagtatacgcttcattatctgatgccattagtatacgcacactatttatttatggcgtgatattaatcattatcggatcaattattggttacattttccaacatcaattcgcattacttttagttggacgtattattcaaactgcaggtttagctgctgcagagacattatatgtgatatatgttgcaaagtatctttctaaagaggaccagaagacttaccttggcttaagtacgagcagttattccttgtcattagttatcggtacattatcaggtggatttatttctacgtatttacactggacaaatatgtttttaattgcattaatcgtagtatttacgttgccattcctatttaaattattaccaaaagaaaataatacaaataaagctcatttagattttgttggcttaattctagtggcaactatcgctacaacagtcatgctgtttattacgaactttaattggttatatatgattggtgccttaattgcgattatcgtttttgcgctatatattaaaaatgctcaacgtccattagtaaacaaatcatttttccaaaataaacgttatgcttcatttttatttatagtatttgtaatgtatgccatccaattgggttatatttttacgttcccattcataatggaacaaatttatcatcttcaactagacacaacatcactgttattagtaccgggttatattgtagcagtcatcgttggtgcactaagtggtaaaatcggcgaatatcttaattcaaaacaagcgattatcacagcaattattttaatcgcactgagcttgattttacctgcatttgcagtaggtaatcacatttcaatcttcgtcatttctatgatattctttgcaggtagctttgctttaatgtatgcacctttacttaacgaagccattaaaacaatagatcttaatatgacaggtgtggctattggtttttataatttaattattaatgtggcggtatctgtaggtattgcgattgctgcggctttaatcgattttaaagcattaaatttcccaggcaatgatgcattaagttcacatttcggtattattttaattattttaggtttaatgagtattgtcggattagttttattcgtcatcttaaatcgttggacacaatctgaaaaataaatagatataaattcgcgagatatattcgtatttatagtaaaattaaataaagagattatataacacgaggagtagtaagtatgaaatttgagaaatatatagatcacactttattgaagcctgagtcaacacgtacgcaaatcgatcaaatcatcgatgaagcgaaagcatacaattttaaatctgtatgtgtgaatccaacgcatgttaaatatgcagcagagcgactagctgattcaggtgtgctagtttgtacggtaataggattcccattaggtgcgtcgacaacggcaacgaaagcatttgaaacagaagatgcaattcaaaatggtgcagatgaaattgacatggtcatcaacatcggcgcattaaaagatgggcgttttgatgatgtacaacaagacattgaagcagtggttaaagctgcgaaaggtcacacagtaaaagtgattattgagacggtattgttggaccatgacgaaatcgtaaaagcgagtgaattaacaaaagcggctggtgcggacttcgttaaaacttcaacaggttttgcaggtggcggtgcgactgcagaagacgttaaattaatgaaagatacagtaggtgctgatgtagaagtaaaagcatcaggtggcgtacgtaatttagaagatttcaataaaatggttgaagcaggtgcgacacgtattggtgcgagcgcaggcgttcaaattatgcaaggtttagaagcagattcagattactaatatatataaaatttgggagtgatagctatgacaagaccatttaatcgtgtacatttaatcgtaatggattcagtaggtattggtgaagcgccagacgcagctgattttaaagatgaaggttcacatactttaagacataccttagaaggcttcaatcaaactttaccaaaccttgaaaagttaggtctagggaacattgataaattaccagtagtaaatgcagttgaacaaccagaagcatactatactaaattgagtgaagcttcagttggtaaagatacaatgactggtcactgggaaattatgggattaaatattatgcaaccttttaaagtataccctaatggattccctgaagagttaattcaacaaattgaagaaatgacaggtcgtaaagttgttgctaacaaaccggcatcgggtacgcaaattatcgatgagtggggcgagcaccaaatgaaaactggtgacttaattgtttatacaagtgcagacccagtattgcaaattgctgcacatgaagacattatcccattagaagagttatatgatatttgtgaaaaggttcgtgagttgacaaaagaccctaaatatttaattggtcgtattatcgcacgtccatatgttggtgaaccaggaaactttacacgtacatctaatcgacatgactatgcgttaaaaccttttggtaaaactgtcttagatcatttgaaagacggtggttatgatgtcattgccatcggtaaaattaatgacatttatgatggtgaaggtgtaacagaagcggttcgtacgaagagtaacatggacggtatggatcaattgatgaaaattgttaagaaagatttcacaggtattagcttcttaaacttagtagactttgatgcattatacggtcatcgtcgtgataaaccgggttatgcacaagcaattaaagatttcgatgatcgcttgccagaactgtttagcaacttaaaagaagacgatttagtaattattacagcagaccatggtaatgacccgacagcgccaggtacggaccatacgagagaatatatcccagtaattatgtacagtccgaaatttaaaggtggtcatgcactagaaagtgatactacattcagttctatcggtgcaactatagcagataatttcaacgtaacattaccagagttcggtaaaagttatttaaaggaattgaaatagaataaatttagatattataaaaacagcagtgaagttaactataacaatagttttcttcactgctgtttttattataatagagaaacgtaagacggtaggacctcttatttaggagtatcctgatttaatgttaaacaatacgttttcggattgaaccggaaattaaatcgacaattgcgaccattagtactaaaccgattaatataatacctacacggtcccaagaacgtgtttgaatggcaaatatgagtggtgttccgataccaccagctccaattagccccagtatagaagctgaacgtaagtttagttcaaagcgataaagtataagtgatagaaaggcaggcataatttgtggtatgactgcaaatacgagtgttttaatcttattcgcaccactggcctttaatgattctacagcactgaaatctagaccttcaatatcttcagctaaaagtttcccaagcatacctacggaatggatacctaaagctaatacacctgaaaatgaacctgggccaacagctttaataaatataagtgccattacaatttctgggaagacacgtataacacttaaaatgaatttgctaacacctgaaactgggcgtaactttaccatattatttgcacctagaaatgctaatggaatacagataattgcggcgatgaaagtacctacaacggctatcgcaaaggtttcaagtaaaccacgtaataagtcttcgccatctggtatatagatatagctgatatcaggatggaataatccgctgaatatggattttaagatttctaatgatttacttttaagttctaaacttggtacacctgaaaatgcccagatgataatagctaagacgacaattgcaataagccatcttttaatcaattttcgtttgtgtgcttttgtgtgaacattataatttgctatttcctgtgtcatgcgagatgtgccctcactttcgtactgatgtaatcaatgacgacgacgataactaaagtaaataaaataatcgttgctgtttttggatattgaaataaaccaagtgtttgatcataaaacaatccaataccgccagcgccgactaatccaagcacagctgaagcacgtatatttacttcaaatgcatataatacgtatgacataaatgacgatatggcttgtggtacaacaccgaaaacaatccattttattttattagcgccaacagccgtcattgcttccattggacctggatctatcgtttccaatgattcatataataattttccaataatacagatagttaaaataaacaatgctaatatccctggaatttgaccgattccaaatacagccacaaagattgcagctaatagcaaatccggtatagtacgaactatatttaaaataaaacgcgagggtattgaaatccacttttgatgaacgatattgctagcacataataacgcaattggtattgaaacgatgctacctaatactgtacttacgatagccattcgaatggtatctaacattggcgttgtaatttgttgtaaatactcgaaatcaggtggaatcatttgtttgaatagatcacctatttgaggtattcctatcattaaatctccaaaattaaaccccgtataaatgaagctccaaatgataagcacaatgattaacatgaaggtaaaactcgtttttaaagaaacctttttctttaaaagggagtcatactttgtaggtgtttctataggcatgttagttcactcctagcttttcatcttctttaattgtacgtccatatatttcactaaatacgtcatctgttgcttcagatgcaggaccatcatagacaacctcaccatcacgtaaaccaatgatgcgtgtgccatattcttttgccaagtcaacaaaatgtaaattaattaaaattgtgatgcctaattcttggttgatttttcttaaatcatccataacctgtttcgttgttaatgggtctaatgaagcaactggttcatctgcaagaataatttcggattcttggcatagtgcacgtgcaatagatatacgttgttgttggccacctgataattcatcagagcgttgattatatttatctaagatgttgacccgttctagtgcatccattgctttaattttgtcttcttttggaaataaacctaataccattttccaagtagggtgataacctacacgtccacttagtacatttcgtaatacacttgaccgtttaactaaattaaaatgttggaaaatcatacctatatttcggcgcatttctaataatgctttaccatgggctttagtgattgatttaccttggatgaaaatttcacctgacgtgatatcatgcaaacgatttacagatcttaataacgtggatttcccagcaccagatagtccgacaatgactgcaaattcacctttttcaatatttaagttaatatttttcaagcctacatgaccgttaggatagactttactgacgtttttaaattcgatttgactcatgtttgacacctttctttaataaagaaaagccaaggtaaactgaaatatcatagacattgggtttctgtgtacaaatggtttcaaatgtacagcgacacctttctatatctgtttcagtttagcgcctagcttttcaatattaatctagaatatatctattgaacgaaagcttttaataccaaattcgataatgattcatttgttaaataatgattatttcatatctttaactaatttttcgtactctcttacaatgtcgaaatttgaatctttcgtttctgtgtatccttcatgtgaataaacttcgctaataattttgtgaccttcttttgatttagcaatgtctataaaagcttttttcaatttctcttggaaatctttatccatatctggtcttacagaaattgtgtcattcggaatagcttgtgttaattttaaaattcgtgtgtctttaaatacatttggttggtcttttttcacagtattacgtgcatcgttaaatacagccgcagcatctacatctccatttaataatgagataactgcttggtcatgacctttaacattcacaattttcatatctttagttgcattaatacctgcttcgttttttaacatcgcaagtgggaatgtatatccagcagttgatgttacatcttgtaaggcaattttcttaccttttaaatctttcaagcttttaatttttgagtcttttttaacaagaatttctgatttataactatctacaagttctttacttgctgaaccatcttcttttacaccaaaacgttgtgcttgtaataataaatcagccgctttttgatcatgtgctaatgtgtatgccgttggtggtaagaaaccaacatcaacttttttagacttcatagcttcaacaattgtattgtagttagttgatacagacactttaactggaattcctaattctttagatagtaatttttctaatggttttgctttagcctctaatgttccagcattttgcgaaggtacaaattgtactgttaattctttaggtttgtatcctcctgatttagaatccgaatcattactagcgttcttttgattatctaaagaacttgaatttccacatgctgctgcaaaaacaatgactgctaacattaatacaaataaacacttaaattttttcatttgataactgtccccttcacattcttaatcgtgtaatatgtatgcaatgaaattacacttatagcgtaccacatttaaatgcgaaaaagtattttataaaaatgaattttaataaccttctttaagagtttgataagattttgtaaatatttcgttaaattgcccatttcaaacatatatttatcctataattcaagaacaaatttattttaaaaggagcctcacaaaatgaaaaaaatatataagtcattaactgtctctgcaattgttgcaacggtatcattaagtgctttaccgcaatctttagctataacgcatgaatcacaacctacaaagcaacagcaaacggtattattcgatcgttcccatggtcaaacagctggtgctgcagattgggttagtgatggtgcattttcagattatgcggattcaatacaaaaacaaggttatgacgttaaagctattgatggtcattcgaacataacagaagcaagtttgaaaagttccaaaatatttgtaattcctgaggctaacattcctttcaaagaatcagaacaggcagcaattgttaactatgtgaaacaaggtggaaatgttgtctttatttcagatcattacaatgctgaccgaaatttaaatcgtattgattcatcggaggcaatgaatggttatcgacgtggagcgtatgaagatatgtcgaaaggtatgaatgcagaagaaaaaagttctactgcaatgcaaggtgtgaaaagttcagattggttatctacaaaatttggcgtacgttttcgatataatgcactaggtgatttaaatacgagcaatattgtttcttcaaaagaaagtttcggtattactgaaggtgtgaaatctgtatctatgcatgctggatcgacattagcaattactaatccagagaaagcaaaaggtattgtgtatacaccagaacaattgccagcgaaaagtaaatggtcacatgctgtagatcaaggtatttataatggcggcggtaaagcagaaggtccctatgtagcaatttctaaagttggaaaaggtaaagcagcatttatcggtgattcatcacttgtggaagatagttcgcccaaatatgtaagagaagataatggagaaaagaagaaaacatatgatggttttaaagaacaagacaacggtaagctattaaataatataacggcttggatgtctaaaaataatgatgggaaatcacttaaggcgagtggcctaacattagatacaaagactaagttgcttgattttgaacgaccagagcgttcaactgagcctgaaaaagagccatggtcacaaccgcctaatggttataaatggtatgacccaaaaacatttaaagcaggtagttatggcagtgaaaaaggcgcagatcctcagccaaacacaccagatgatcatacgccaccaaatcagaacgtaaaaatatcatttgatatcccgcaaaatgtttctataaatgagccatttgaagtgacaatacatttaaaaggatttgaagcaaatcaaacacttgaaaatcttagagttggtatttacaaagaaggcggacgtcaaatcggacaattttcaagtaaagataacgattataacccgccaggttacagtactttgccaacagttaaagcagatgaaaacggaaatgccacaattaaggtcaatgctaaagtacttgaaagtatggaaggttcaaagattcgtttaaaactcggtgacaaaaccttgattacaacagacttcaaataaatatataatagaaataagaaagatgtttgtgattgaaggagtgagtgaggatgtcaaacatagcattttatgtcgtgagtgacgtacatggttatattttcccaacagattttacgagtagaaatcaatatcaacctatgggattgttactagcgaatcatgttatagaacaagacagaaggcagtatgaccaaagttttaaaatagataatggtgattttttgcaagggtcaccattttgtaattacttaatcgcgcatagcggcagtagccagcctttagttgatttttataatcgaatgtcatttgactttggtacgcttggtaatcatgaatttaattatggattaccatacttaaaagacactttacgcagactcaattatccagttttgtgtgctaatatttatgaaaatgatagtacattgagtgataacggtgtgcagtattttcaggttggagatcaaacggttggtgtgataggtttaacgacacaatttattccccattgggaacaaccagagcatattcagtcacttacgtttcatagtgcttttgaaacacttcaacaacacttgcctgaaatgaagcgacatgcagatatcattgtggtttgttaccatggtggatttgaaaaggatttagaaagtggtacgccgaccgaagtgttaacgggtgaaaatgaaggatatgccatgttagaagcgttttctaaagaaatagatatctttattactggtcaccagcatcgacaaattgctgaaaggtttaaggatacggctgtgattcaacctggtacaagaggtacaactgtaggaaaagttgtcttgagtactgatgaatatgaaaatctatccgttgaatcatgtgaattacttcctgttatagatgatcccacatttactattgatgaagatgaccaacatatacgaaagcagttagaggactggttagattacgaaattactacattgccatatgatatgacgattaatcatgcatttgaggcacgtgtagctccgcatccttttacaaattttatgaattacgctttattagaaaaaagtggagcagatgttgcctgtacagctttgtttgattctgctagtggtttcaagcaagtcgtgacgatgcgagatgttattaacaattacccatttccaaatatatttaaagttttagctgtaagtggtgccaaacttaaagaagccattgaacgatcagcagaatattttgacgtgaaaaatgatgaagttagtgtgagcgcagacttccttgaacccaaaccacaacactttaattatgatatatatggtggcttaagttataccattcatgttggaagaccaaagggacaacgtgtgagtgatatgatgattcaaggtcacgcagttgatttaaagcagacatatacaatttgtgtaaataattatcgtgcagttggcggtggtcagtatgatatgtatatcgacgcgccagttgtaaaagatattcaagttgaaggcgcacaattacttattgattttttatcaaataataatttgatgcgtatcccgcaagttgttgattttaaagttgaaaagtgacggatatatgtaaaacttacttgattttaatcgggtaagtttttgtttttgtttaaactaatcactattaaacaccaatatactttaaggaaaatgttgattttacaaaatatgaggcttatattttatataacttaatattatgaagtgattaatttggaaacaattaaacaagaagtaagagaatctattgttaaaggaattatcgcgggatataaggactatgttaatgagagaaatgaagtcaagaaacgtatggtgattagtgatgcctatgtgtacaccaaatctaatcatattgaaaatcaagttgctaagcatttggaaaattttgttaagtatattaaagaaaatgctggaccatcatggaagtatttaaagtttatatttaataaagatgaagagaaaaataatatcatgtttatattgaaaaatgaagattactttgatgaaaaaaatgtaagcgtagggaagagtttagttgctgataaaaatccaaaaagtaaaaactacctagaggtacttatggctaagaatagggacattaattttggtactgttgaagaagattttgaaattgggcatcaaatgactgcagatagtatattatttaatataaaagaaggcagtaatagagatattaattcttattttttaattattacatatcgtattgataaagaatcaaagcaattagctgcaatcaaacaatggttaccaaatccagaaacaaattctgcaattatggttgatgatttgacagagttaattgaaaaagtaatagtagaaagagaagattatcatattgacgaagaagagttagaagtacttaaaaacgatggagagttagaactcatagatgtggaacatgcatttggtatcaatatcgatgaaggtaacgatatgattgaaagtgaaaggtgaagttaatgtttattggcaagaatttagaatacgtgaggaagcttaatgctctaagtagaaaagaattatcagaaaaaataaatgtgagtgaacaagcaatttggcaatatgaaacaaaaaatatgatgccagaaattagtaaaatttatgatatgacatctatttttaatgttaaatctagctactttattagcgagcagcccgaagagctcctaataaattctgtcgataaacatagtatagcttttagagcaaaaaattataaagtatctacgaaactattaaataagcaatattatcaagcaatgtatttatctaatttaactagctacttattttcttttgtaaagataccggataatattattttatctttaataaataatttagatggcttgttgaatggcaatttagaatcactaaataaaaaagaaagcataaaagaaattgctaaagttgtgagggctaaaattcttcaagacgaaagcaatgaagcactattatttatgcttgaaaaagcgggtatagtcatatacgaaaagcgaattaatgatagcatagacgcatatagtttttggagtaaagatctgacaccttttattatactgggtacaaataagggggtagcagttagaaggaattttgatcttgcacatgagctgggacatctcgttctacatcgtcatattcaattcgacttattatctcctgaagaatataagacaattgaacatgaggcagatattttcgcctctgaatttttactacctgaagaagcgtttgaaaaggactttgatcaaatgacaaaaaaatcaaatcctgattatttagctgtattgaaagaaaaatggtatgtttctatacaagcaattgcaatgagagcctattatctaggtctaatgtctagtactcagtacagatatttttgggcatcattaaataaaaaaggctataaaagtaaagagcctttagacgacgtgattgaaatgtcacgtcctgtcaaaatgaatagtttattaaagttgtattttgatagaaatatactgacaccacaaaaattattgaattatttaaaagttgatgaaacatttttgaatcatctagcaggtattaatttaaaactctttaaggattatgttaatgaaaatagagaatataatataacgaatctatataaataaggcaccaatatttaaacctcgagctgaaaagaatatcatttcagttcgagtttttttatttgtaacatctattgataggtatcgacaagaaccttttaatgttgtgttttgtgcgatataacaagctttttaggctattaaagaatattcagaattaaatatataattatgaataaattatgtcgttgaaaaaattatgattatataatcattctaaaaacaccgaaataacaatgatttcatgaaaacatttattttaaaatttgatatttgttcaaataatattcgaaattaaacttttttgtatagaattttctttatatcctgagagacatgtactataatgtttgtgaaataattcacaaagtataaaggagtggttgtatatgttaactatacctgaaaaagaaaatcgtggatcgaaagaacaagaagtggcaattatgattgatgctctagctgacaaagggaaaaaagcattagaagcattatctaaaaagtcacaagaagaaattgatcatattgttcatcaaatgagcttagcagctgttgatcaacatatggtgctagcaaaattagcacatgaagaaactggaagaggtatatacgaagataaagcgattaaaaatttatacgcttctgaatatatatggaattcaataaaagacaataaaacagtagggattattggtgaagataaagaaaaaggattaacgtatgtagcggaaccaattggtgttatttgtggtgttacgccaacaacaaatcctacgtcgacaactatttttaaagcgatgattgcaattaagacaggaaatccaatcatttttgcattccatccaagtgcgcaagaatcgtcgaagcgtgcagcagaagttgtattagaagcggcaatgaaggcaggtgcacctaaagatattattcaatggattgaagtgccttctatcgaagcaacaaaacaattaatgaatcacaaaggtattgcattagttctagcaacaggtggttcgggcatggttaagtctgcatattcaactggtaaaccggcattaggtgtgggaccaggtaacgtgccgtcttacattgaaaaaacagcacacattaagcgtgcagtaaatgatatcattggttcaaaaacatttgataatggtatgatttgtgcttctgaacaagttgtagtcattgacaaagaaatttataaagacgttactaatgaatttaaagcacatcaagcatattttgttaaaaaagatgaattacaacgcttagaaaatgcaattatgaatgaacaaaaaacaggtattaagcctgatattgtcggtaaatctgcagttgaaatagctgaattagcaggtatacctgtccccgaaaatacaaaacttatcatagctgaaattagcggtgtaggttcagactatccgttatctcgtgaaaaattatctccagtattagccttagtaaaagcccaatctacaaaacaagcatttcaaatttgtgaagacacactacattttggtggattaggacacacagccgttatccatacagaagatgaaacattacaaaaagattttggactaagaatgaaagcttgtcgtgtacttgtaaatacaccatcagcagttggaggtattggtgatatgtataacgaattgattccgtctttaacattaggttgtggttcgtacggtagaaactcaatttcacataatgttagtgcgacagatttattaaacattaaaacgattgctaaacgacgtaataatactcaaattttcaaggtgcctgctcaaatttattttgaagaaaatgcaatcatgagtctaacaacaatggacaagattgaaaaagtgatgattgtctgtgaccctggtatggtcgaattcggttatacaaaaacagttgagaatgtattaagacaaagaacggaacagcctcaaattaaaatatttaacgaagtcgaaccgaacccatcaactaatacagtatataaaggtctggaaatgatggttgatttccaaccggatacaatcattgcacttggtggtggttcagcgatggatgctgcaaaagcaatgtggatgttctttgaacaccctgagacatcattcttcggtgctaaacaaaagttcctagacatcggtaaacgtacttataaaataggcatgcctgaaaatgcgacgttcatttgtatccctacgacatcaggtacaggttcagaagtaacaccatttgcagttatcacagatagtgaaacaaatgtaaaatatccgttggctgattttgctttaacacctgacgttgcaattattgaccctcaatttgtgatgagtgtgccaaaaagcgttacagcagatacaggaatggatgtactaacgcatgcaatggaatcatatgtatctgtaatggcttcagattacacaagaggtttgagtctacaagcgattaaattgacgttcgaatatttaaaatcatctgttgaaaaaggtgataaagtttcaagagagaaaatgcataacgcatcaactttggctggtatggcatttgcaaatgcattcttaggcattgcacactcaattgcgcataaaattggtggggaatatggtattccgcatggtagagcgaatgcgatattactaccgcatattatccgttataatgctaaagacccgcaaaaacatgcattattccctaaatatgagttcttcagagcagatacagattatgcagatattgccaaattcttaggattaaaaggtaatacgacagaagcactcgtagaatcattagctaaagctgtctatgaattaggtcaatcagtcggaattgaaatgaatttgaaatcacaaggtgtgtctgaagaagaattaaatgagtcaattgatagaatggcagagctcgcatttgaagatcagtgtacaactgctaatcctaaagaagcactaatcagtgaaatcaaagatatcattcaaacatcatatgattataagcaataatctatctgataataatcatctaactcacctgaaattacaaaagtaaaaaaatgccacataaactttaagtcgataatcattatatggttatcggcttttatttattgctaaatcttcagagagatacaaactagacaatcattttttaaataaagaaaatattaagattgatactcatttcacaaaatattactactttagagtataattatttttaatttcatataaataaaaaggcgaaaataatgcggtttaaaagtaattaattgtttaaacgatatgtaatatgtaaatactatatatataataccaattttaatgaaaatttttaagggaggtaaataatggaaagtacattagaattaacaaaaattaaagaagtattacaaaaaacttgaagattttaattattttaccgctattatttttaattataagcgcgattgttacatttttcgtcttatcacctaaatatcaagctaatactcaaattttagtgaatcaaactaagggtgacaatcctcagtttatggcgcaagaagttcaaagtaatattcaacttgtaaatacgtataaagaaattgttaaaagtcctagaattttagatgaggtgtcaaaggacttagatgataagtattcaccatctaaattatcgagtatgttgacaattacaaatcaagaaaatacacaacttatcaacatccaagttaaaagtggtcataaacaagattcggaaaaaattgcgaatagcttcgctaaagttacaagtaaacaaattccgaagattatgagtgtggataacgtatcacttttatctaaagcagacggtacagcagttaaagtcgcaccaaaaactgtagtgaatctaatcggtgcattctttttaggattagttgtcgcgcttatatatatcttcttcaaagtcattttcgataagcgaattaaagatgaagaagatgtagagaaagaattaggattgcctgtattgggttcaattcaaaaatataattaaggatggttgctacttatgtcaaagaaggaaaatacgacaacaacactatttgtgtatgaaaaaccaaaatcaacaattagtgaaaagtttcgtggtatacgttcaaacatcatgttttcaaaagcaaatggtgaagtaaagcgcttattggttacttctgaaaagcctggtgcaggtaaaagtacagttgtatcgaatgtagcgattacttatgcacaagcaggctataagacgttagttattgatggcgatatgcgtaagccaacacaaaactatatttttaatgagcaaaataataatggactatcaagcttaatcattggtagaacgactatgtcagaagcaattacgtcgacagaaattgataatttagatttactaacagctggtcctgtacctccaaatccatctgagttaattgggtctgaaagcttcaaagaattagttgatatgtttaataaacgttacgacattattattgtcgatacaccgccagttaataccgtgactgatgcacaactatatgcgcgtgctattaaagatagtctgttagtaattgatagtgaaaaaaatgataaaaatgaagttaaaaaagctaaaacacttatggaaaaagcaggcagtaacattctaggcgtcattttaaataaggcaaaagtagataaatcttctagttattatcactattatggagatgaataagtatgattgatattcataaccatatattgcctaatatcgatgacggtccgacaaatgaaacagagatgctggctcttttaaaacaagcgacaacacaaggtgttacagaaatcattgtaacatcacatcacttacatcctcgatataccacacctatagaaaaagtgaaatcatgtttaaaccatattgaaagcttagaggaagtacaagcactgaatctaaagttttattatggtcaggaaataagaattaccgatcaaatccttaatgatattgatcgaaaagttattaccggtattaatgattcacgctatttactaatagaattcccatcaaatgaagttccacactatactgatcaattatttttcgaattacagagtaaaggctttgtaccgattattgcacatcctgagcggaataaagctataagtcaaaaccttgacatactatacgatttaattaacaaaggtgctttaagtcaagtgacaacggcgtcattagcgggtatttccggtaaaaaaattagaaaattagcaattcaaatgattgaaaacaatctgacacatttcatcggttcagatgcgcataacacagaaatcagaccgttcttattgaaagacttatttaatgataagaaattacgtgattattatgaagatatgaacggatttattagtaatgcgaagttagttgttgatgataaaaaaattcctaaacgaatgccacaacaagattataaacagaaaagatggtttgggttataaacagcaaatgaggggttttatggcacatttatctgtgaaattgcggcttttaatactagcattaatcgattcactgatagtgacattttcagtattcgtaagttattacattttagaaccgtatttcaaaacatattctgtcaaattattaatattggcagctatatcactattcatatcgcatcatatttcagcatttatttttaatatgtatcatcgagcgtgggaatatgccagtgtgagtgaattgatattaattgttaaagctgtgacgacatctatcgttattacgatggtggtcgtgacaattgttacaggcaatagaccgttttttagattgtatttaatcacttggatgatgcacttgattttaataggtggctcaaggttattttggcgtatttatcggaaataccttggaggtaagtcatttaataagaagccaactttagttgttggtgctggccaagcaggttcaatgctgattagacaaatgttgaaaagtgatgaaatgaaacttgaaccggtattagcagtggatgatgacgaacataaacgcaatatcacaattactgagggtgtaaaagtccaaggtaaaattgcggatattccagaactagtgaggaaatataagattaaaaaaatcatcattgcaattccaaccattggtcaagagcgtttgaaagaaattaataatatttgccatatggatggcgttgagttattgaaaatgccaaacatagaagatgtcatgtctggtgagttagaagtgaaccagctgaaaaaagttgaagtagaagatttattaggcagagatcctgttgaattagatatggatatgatatcaaatgaattgacgaataaaactattttagttacgggtgcaggtggttcaataggatcagaaatttgtagacaagtttgtaatttctatccagaacgtattattctacttggccatggtgaaaacagtatttatttaatcaatcgtgaattgcgaaatcgcttcggaaaaaatattgatattgttcctattatagcggatgtgcaaaatagagcgcgtatgtttgaaattatggaaatgtataaaccatacgcagtttatcatgcagcagcacacaagcacgtgccgttaatggaagacaaccctgaagaagcagtacgtaataatattttaggtacgaaaaataccgctgaagctgcaaaaaatgcagaggtaaagaaattcgttatgatttctacggataaagccgttaatccacctaatgtcatgggagcttcaaagcgaattgcagaaatgattattcaaagtttaaatgatgaaacgcatcgaacaaattttgttgcagtgagatttggtaatgtacttggatcgagaggatctgtgattccacttttcaaaagtcaaattgaagaaggtgggccagttactgtgacacatcctgaaatgacacgttactttatgacaattcctgaagcttctagactagttttgcaggcaggggcattagcagaaggcggcgaagtatttgtactagatatgggagaaccagtgaaaattgtagatttggcacgtaatttaattaagctaagtggtaaaaaagaagacgacatacgcattacttatacagggattagacccggcgaaaaaatgtttgaagagcttatgaataaagatgaggttcatcctgaacaagtatttgaaaaaatttatcgtggcaaagtacaacatatgaaatgtaatgaagttgaagcgattattcaagacatcgtcaatgactttagtaaagaaaaaattattaactatgccaatggcaaaaagggagataattatgttcgatgacaaaattttattaattactgggggcacaggatcattcggtaatgctgttatgaaacggtttttagattctaacattaaagaaattcgtattttttcacgcgatgagaaaaaacaagatgacattcgaaaaaaatataataattcaaaattaaagttctacattggtgatgtgcgtgatagtcaaagtgtagaaacagcaatgcgagatgttgattacgtattccatgcagcagctttaaaacaagtgccgtcatgtgaattctttccagttgaggcagtgaagacaaatattattggtacagaaaatgtcttacaaagtgctattcatcaaaatgttaaaaaagtcatatgtttatctacagataaggcagcgtatcctattaatgctatgggtatttcgaaagcaatgatggaaaaagtattcgtagccaaatcaagaaatattcgtagtgaacaaacgcttatttgcggtacaagatacggtaatgtgatggcttcaagaggatcagtaattcctttgtttatcgacaaaatcaaagctggagaacctttaacgattacagatcctgaaatgacaagatttttaatgagcttagaagatgcggtagaactagttgttcatgcatttaagcatgcagagacaggcgatattatggttcaaaaagcaccaagctcaacggtaggggatcttgcgaccgcattattagaattgtttgaagctgataatgcaattgaaatcattggtacgcgacatggagagaaaaaagcagaaacattgttgacgagagaagaatacgcacaatgtgaagatatgggtgattattttagagtgccggcagactccagagatttaaattatagtaattatgttgaaaccggtaacgaaaagattacgcaatcttatgaatataactccgataatacacatattttaacggtggaagagataaaagaaaaacttttaacactagaatatgttagaaacgaattgaatgattataaagcttcaatgagataggagagattgacgttgaatattgtaattacaggagcaaagggttttgtaggaaaaaacttgaaagcagatttaacatcaacgacagattatcatattttcgaagtacatcgacaaactaaagaggaagaattagagtcagcgttgttgaaagcagactttgtcgtgcatttagcgggagtgaatcgacctgaacatgacaaagaattcagcttaggaaacgtgagttatttagatcatgtacttgatatattaactagaaatacgaaaaagccagcgatattactatcgtcttcaatacaagcaacacaaaataatccttatggtgagagtaagttgcaaggggaacagctattaagagagtatgccgaagagtatggcaatacggtttatatttatcgctggccaaatttattcggtaagtggtgtaagccaaattataactcagtgatagcaacattttgttacaaaattgcacgtaacgaagagattcaagttaatgatcggaatgttgaactaacgctaaactacgtggatgatatcgtcgctgaaataaaatgtgctattgaaggaaatccaacgattgaaaatggtgtacctacagtaccaaatgtatttaaagtgacattgggagaaattgtagatttattatacaagttcaaacagtcacgtctcgatcgaacattgccgaaattagataacttgtttgaaaaagatttgtatagtacgtatttaagctatctacctagtacagactttagttatcccttacttatgaatgtggatgataggggttcttttacagaatttataaaaacaccggatcgtggtcaagtttctgtgaatatttctaagccaggtattactaaaggtaatcactggcatcatactaaaaacgaaaaatttctagtcgtatccggtaaaggggtaattcgttttagacatgttaatgatgatgaaatcattgaatattacgtttctggcgacaaattagaagttgtagacataccagtaggatatacacataatattgaaaatttaggcgacacagatatggtaactattatgtgggtgaatgaaatgtttgatccaaatcagccagatacgtatttcttggaggtatagcgtatggaaaaactaaaattaatgacaatagttggtacaaggcctgaaatcattcgcttatcatcaacgattaaagcatgcgatcaatattttaatcagatattagtacacactggtcaaaattatgattatacattgaatcaaattttctttgatgatttggaattaagacaaccggaccactacttagaggcagttggaagtaacctcggagaaacgatggggaatattattgcgaagacatatgacgttttattacgcgaacaaccagatgcacttttaattcttggtgatacaaatagttgtttagcagcagtatctgctaaacgattaaagattcctgtgtttcatatggaagcgggtaatagatgctttgatcagaatgtacctgaagaaatcaatcgtaaaattgttgaccatgtcagtgatgtgaatctaccttatacggaacatagcagacggtatttattagatgaaggcttcaataaagcgaatatctttgtgacaggatcaccgatgacagaagtgatagaagcgcatcgagataaaattaatcacagtgacgttttaaataaactaggattagaaccgcaacaatacattttagtatctgcacatagagaagagaatatcgataatgaaaagaattttaaatcattaatgaatgcgataaatgatattgccaaaaagtataaaatgcctgtgatttattcaacgcatccaagaagttggaagaaaattgaagaaagtaaatttgaatttgatccattagttaaacagctaaagccatttggtttctttgattataatgcattgcaaaaagatgcatttgttgtgctatcagatagtggaacattgtcagaagagtcgtctattttgaagttccctggtgtccttattcgaacttccacagaaagaccggaagtactagataaaggtacggttattgtaggtggtattacctataacaatctaatccaatctgttgaactagcaagagagatgcaaaacaataacgaaccgatgattgatgctattgattataaagacactaacgtttcgacaaaagtagttaaaattattcaaagttataaagatattatcaatcgaaatacttggaggaaatgacgatgaggatagcgattcttggcgctactaacattaagcatatgtcattattatcacattatttaaaccacattgatttgaatatcaatgaggtggacattatatacactgacaaatatgatatcgaagaacatatccaaggcatcaataattactataaatataaagtagatattaaagaagattggacatttatcaaaaaagctattgcttactatcgatttaggccgtacgctatgaaaattcttaaagaaaatcattatgattttgtcatagtatggggaagttatacaggacacttatttaaaagttttttagaaaaacactataaaaataaattcattttaaatataagggactacttttttgaaaataataaacttattaagtatagaatgaaaaaaatcgttgatgctagcaggctgacaacattatcttcagaaggttttcttaaatttttacctaaatctgaaaaatatagaattatttatagttataacatgagtattattagagaaagtaatgtgaccgatggattcaaaaaaagatggccaattaatataggttttattggtaatgttagatttaatgagataaatcaaaaattgataaaggaactggcaaatgattcaaggttccatatgcaatattttggaacagggtcggaaaaattagaagtctttgctcgagaaaattttattaataatattacattttctggcggttttgacttgaaagaaaccccaaaatatttaaataaaattgatatacttaataatttgtttggtaatcaaaatattgctttagatactgctttatccataagaatgtattatgcgttgtttttaaacaaacctattattacaacagacgatacattcaccgctacagaagctaataaattcggactgggttttagtgttaatccagaaaatttaaaaggtattggtgatgaattgatggattggtataacaatttggatgtaatggacattaatcataaaagagaagcttatagaaacgatgtaattgaaaataataaacagttctatcaagagataggcaggatatttaatgaataagatatataatgtcacttcatatgttattgccattttaatgtttccttgccttatgttaggtgataaacctttattatttttagcacctataagttatggagtaggaaagctctttataagcttctcgaataatccgaattttaaattttcgaaaattgtatacgatgttttaggttttcttagattagtatttatacctgctatgatagtgtttttccaggattcaactatagataatttaccattaggacaagcttattttaatcaagcggttatttatatgagtgtggagtttatcataggatcgctatttatattgatactatctaaattattcaaacatgaagtggtatcaagaaatagctttacactttctggatcatcaatttattacattgtgtttggtcttgttatttgtgggatttttgtagcttttcccgaagtgcgcaaaaacatatcatttttaattattaaaacagatgcaatgggaagaggaaccgaagcaacaagtggtttaaatgtcctttttgtaatgctatttcaacttgccttagcgttattattcttaataatcgcatatgcttcatataaaaagtataaagagaatcctaaaattatttatgttgtattgccgctagctataggaattttaaatattagtttaattgttggtgaaagaagaagttatcaactttatacgatggttgctgttttaacagtggtgtcactcttgttttctaaacacaaaagacgtatcaatatcattattatatctgttggtattttcgtattagcattgatgacactatataaagaattgtatgtgtttaattatagttcatatagcgaggcgttaaatagtacaagtgtaagtaatcttaagatagttgacacgttgcagtcatatttttatggacctagcaatattgcagcttctatagactatttgaattactataatggttcgttcaaacaatatttatttgataatactagagctgtttttgggtttaatttctttgtagataaaaagcagttgattactagccaactttttaaccaattgatatatggtagtaaacaattgactgggcatctaatttcgagtgctggatatggaattatttattttggacccttattcttctatttgaatttaattgcaaatatcttttttgcatttctgagtgagtatattattcggaagagtcattcgttagaagtgatatttatcggtacatatatttatatgagacttattacgagtatttttagtcacccgacaccattaatcacattgatttctatgattttagttgtatatgttatagctattatcccaggcattataataaaaaaatttactaaaaaagtagggatagaatgattgtaaaaacatttatgaaatcgaaaatatttagattaatgaatacaccactattattattttataagaaagaatatttaactggatattattttgaaaataaagtggctggatggttatgggcatggaaagctgttccgttcaagttgttaggaataaatacgagcttgccatttcctgcagatataactgttagaatgcataaccctaataacattgtttttgataaaaatgatattcatattttccaatcgcccgggacgtattttaataatttttcagcagttatatatataggtagaggtgtttatatagcgcctaacgtaggtattattacagctaatcataatattaaaaatttgaagtcacatgcaccaggtgaagatgtcaaaatagggaattatagttggattggaatgaactcagttatattaccaggagtagaattgggagaacatacaattgtaggggctgggtcggttgtaacaaaaagttttccagaaggtaacgttgttataggtggaaatccagcgaaagtcatcaagaaaatctgaggttaattatgagattaaataaatttattggcgattcgttcttaatgattttaagcagtggcatcgctcaagtcatattaatcatcactaccccaattattacaagactatattcacctacagaatttggtgagtttacaattttttcaaatatcgcaatgattttaataccaataataaatgcaagatacgatttgttgattgtgaataccaaaaatgaccgtagtgctaatatactttcacaaatcagttttttgatatcattgcttattttattaatactgataccaatatttgcgattagtgcatggttatacccaaactttatattagattttattttcattattattatgttgtttttggtaagtttaacaaacatttttacaaattatctaaataaggaaagaaaatataaagtgttaagtttgattaatgtgtttagagctggatcaatggctttacttcaaatcattttcggacttttagcattaggaagtctaggattaattattggtttttcattatcctatatcgcaggcattacactaggatataaaacgtttaaaaagcactttaatattgtgagagataaagaagaaactaaagcattatttttagaaaataaaaatcagttagtttattcaacaccatcaatattattaaatagtttgtctttctcggttgttgtgttctttataggtattttgtataccaatacagaagtaggtatttatggtatggccataagagtactaggcataccagtgacaattatttctttagggttatcaaaaatatttatgcaacaagctaatgactattatattgagcatggtaacttccgaaatttattacttaaatttagttccatactggttatagtttctataattctttatgtgccactttatttgttcagtgaagaattagtcaatatattattaggacacagctgggttgacgcaattacagttataaaaattgttatcccattatttgttataagactgattgtatcaacggtatcactttctgtgattgtattacaaaaacaacagttagaattaatactacaagcgttatttttaataggtactactgtaacatttgttatatcaaaaatgcttaatttaacttttttaaattttgtatctattaatacagttgttttaatcgtatcgtacatgatatttttcatagcactctattattttgctaaaaataaacagttcaaaaattcttagtctaaattcattaataaaaaggacgtcgattagatgagtgaaaaaaagattttgattttatgtcagtatttttatccggaatatgtatcttctgcgacgttaccaacacaattggcggaagatttaattgcgaatcacattaatgtcgatgtcatgtgtggatggccatatgaatatagtaatcataaacaggtttctaaaaccgagatgcatcgtggtattcgcattcgacgtctcaagtattcgaggtttaataacaaaagtaaggttggaaggatcatcaatttctttagtttattttcaaaattcgtgattaatatacctaaaatgttgaaatatgatcagattcttgtttactctaatccaccaatcttgccattaataccagacgttctacacagactgtttaagaaaaaatattcttttgtggtgtatgatatagcacctgataatgcgattaagacaggagctactcgtccaggtagcatgattgataaactgatgcgttacattaatagacatgtctacaagaatgctgaaaatgtcattgtccttggtacggaaatgaaaaactacttagtaaatcatcaaatttctaaaaatcctgataatattcatgtgattcctaattggtatgacatgcgtcagttacaagacaatcgtatctataatgacacatttaaagcttaccgtgagcaatacgacaaaattttattgtatagcggtaatatggggcagttacaggatatggagacacttatctcatttttaaaattaaataaggatcagcctcaaacgttaacaatactttgtggtcatggtaagaaatttgcagatgtcaaaacggcaatagaagaccatcgtattgaaaatgttaaaatgtttgagtttttaacaggtacagactatgctgacgtattaaaaattgcggatgtatgtattgcatcgctgattaaagaaggcgtcggtttaggcgttccgagcaagaattatggctaccttgcagctaagaaaccgttggtactcatcatggataagcaatctgatatcgttcaacatgttgaacaatatgatgcgggtatccaaattgataatggcgatgcacatgccatttataacttcatcaacactcactcgagtaaggaattgcacgagatgggtgagcgcgcacatcaactgtttaaagataaatatacgagagaaattaatactatgaagtattacaatctgttgaagtgaggagataattatgaagcgattattcgatgtagtgagttcaatatatggtttagtagttttaagtccgattctgttaattacagcattactaattaaaatggaatcatctggaccagccattttcaaacaaaaaagaccgacgattaataatgaattgtttaatatttataagtttagatcaatgaaaatagacacacctaatgttgcaactgatttaatggattcaacatcgtatataacaaagacagggaaggtcattcgtaagacctctattgatgaattgccacaattattgaatgttttaaaaggagaaatgtcaattgtaggtcctagaccagctctttataatcaatacgaattaattgaaaaacgtacaaaagcgaacgtgcatacaattagaccaggtgtaacagggctagctcaagtgatggggagagatgatattactgatgatcaaaaagtagcgtatgatcattattacttaacacatcaatctatgatgcttgatatgtatatcatatataaaacaattaaaaatatcgttacttcagaaggtgtgcatcactaatgagaaaaaatattttaattacaggcatacatggatatatcggtaatgctttaaaagataagcttattgaacaaggacatcaagtggatcaaattaatgttaggaatcaattatggaagtcgacctcgttcaaagattatgatgttttaattcatacagcagctttggttcacaacaattcacctcaagcaaggctatctgattatatgcaagtgaatatgttgcttacgaaacaattggcacaaaaggctaaagctgaagacattaaacaatttatttttatgagtactatggcagtttatggaaaagaaggtcaggttggtaaatcagatcaaattgatacacaaacaccaatgaatcctacgaccaattatggtatttccaaaaagttcgctgaacaagcattacaagcgttgattagtgattcgtttaaagttgcaattgtgagaccaccaatgatttatggtgcacattgcccaggaaatttccaacggttaatgcaattgtcaaagcgattgccaatcattccaaatattaacaatcagcgcagtgcattatatattaaacatctgacagcatttattgatcaattaatatcattagaagtgacaggagtgtatcatcctcaagatagtttttactttgatacatcgtcagtaatgtatgaaatacgtcgccaatcacatcgtaaaacggtattgatcaacatgccttcaatgctaaataagtattttaataagttgtcggtatttagaaaattattcggcaatttaacatacagcaatacgttatatgaaaataataatgcacttgaagttattcctggaaaaatgtcacttgttattgcggacatcatggatgaaacgacaaccaaagataaggcataagtcatctattaaataaaatcaacatacaaatcgttttatttggaggttatagtatgaagttaacagtagttggcttaggttatattggtttaccaacatcaattatgtttgcaaagcatggcgtcgatgtgcttggtgttgatattaatcagcaaacgattgataagttacaaagtggtcaaattagtattgaagaacctggattacaagaggtttatgaagaggtactgtcatcgggaaaattgaaggtatctacaacgccagaagcatctgatgtttttatcattgccgttccgacgccgaataatgatgatcagtaccggtcatgtgacatttcgctagttatgcgtgcattagatagtattttaccatttttagaaaaaggaaataccattattgtggagtcgacaattgcgcctaaaacgatggatgattttgtaaaaccagtcattgaaaatttagggtttacaataggtgtagatatttatttagtgcattgtccagaacgtgtactgccaggaaaaattttagaagaattagttcataacaatcgtatcattggcggtgtgactaaagcttgtattgaagcgggtaaacgtgtctatcgcacattcgttcagggagaaatgattgaaacagatgcacgtactgctgaaatgagtaagctaatggaaaacacatatagagacgtgaacatttctttagctaatgaattaacaaaaatttgcaataacttaaatattaatgtattagatgtgattgaaatggcaaacaaacatccgcgtgttaacatccatcaacctggtccaggtgtaggcggtcattgtttagctgttgatccgtactttattattgctaaagaccctgaaaatgcaaagttaattcaaactggacgtgaaattaataattcaatgccggcctatgttgttgatacaacgaagcaaatcatcaaagcgttgagcgggaataaagtcacagtatttggtttaacttataaaggtgatgttgatgatataagagaatcaccagcatttgatatttatgagctattaaatcaagaaccagacatagaggtatgtgcttatgatccacatgttgaattagattttgtggaacatgatatgtcacatgctgtcaaagacgcatcgctagtattgattttaagtgaccactcagaatttaaaaatttatcggacagtcattttgataaaatgaagcataaagtgatttttgatacaaaaaatgttgtgaaatcatcatttgaagatgtatcgtattataattatggcaatatatttaattttatcgacaaataaaatgtgtcaaactagagcatacatgattaaggaaagataagctgtcatgtgtttgaacttcagagaggataatgttatgaaaaaaattatggttattttcggtacgagacccgaagcaataaaaatggcaccattagtaaaagaaattgatcataatgggaactttgaagcgaatattgtgattacagcacaacatagagatatgttagatagtgtgttaagtatatttgatattcaagctgatcatgatttaaatattatgcaagatcaacaaacgttagcgggcattacggcgaatgcgcttgctaaacttgatagcatcattaatgaggaacagccggatatgattttagtacatggtgatactacaacgacttttgtaggaagtttggcagcattttatcatcaaattccggtcggacatgtagaagctggacttcgaacacatcagaaatactcaccatttcctgaagagttaaatcgagtcatggtgagtaatattgctgaattgaattttgcgccaacagtaattgcagctaaaaatttactttttgaaaacaaagacaaagagagtatctttattactggaaatacagttattgacgcattgtcaacaacagttcaaaatgattttgtttcaacgattattaataaacataaaggcaagaaagttattttactaacagcgcatcgtcgtgaaaatattggggaaccgatgcatcagatttttaaagcggtaagagatttggcagatgaatataaagatgttgtcttcatttatccaatgcatcgtaatccaaaggtaagagcgattgccgaaaaatatttatctgggagaaatcggattgaattaattgagccattagatgcgattgagtttcataattttacaaatcaatcgtaccttgtgctgacagattctggtggtattcaagaggaggctcctacatttggaaaacctgtgttggtattaaggaatcatacagagcgtccagaaggcgttgaggcgggaacatcgagagtaattggcacagattatgacaatattgttcgaaatgtgaaacaattgattgaggatgatgaagcgtatcaacgtatgagtcaagcgaataatccatatggtgatggacaagcatcacgacgtatttgtgaagcaatagaatattattttggattgcgttcagacaagccggatgaattcgtacctttacgtcacaaataataaaaaacccctaatcatgaagtaggtttagacaaccagcggtgactaggggtttttaatatgtttatttttgatagtggtagccaatatcatatttgaatactttatttgataatattggactttgctgtccatcgtcatcactttttaaacgtacatttttatgagcttctttaaatacatcggaattcaaccaattattaaagctatcttcagattcccaaatagttaagattttaacttcgtctgtatcctcggtatttaatgttttagtgacaaacatttgttggaagccttcaatagtttcaataccttgtctattgtaaaaacgttcaatcgtttcttctgcactgcctttttgtaattgtaatctattttctgccataaacatgggcaatcactcctctattttattatttgatttgggtaatgtttttacaaatgtaaagagtacagcggtttgtatgataaccattatgattaatcctacacggactgcaagaacatccaccatataaattgaaaaacctattacaatgtataagctaattaaaattttaattttctgttgtagcgtgtagcctcgatgtaaataaaagttttctacatattctttataaattttttgattaataagccaattgtaaaagcgatctgaacttcgagcaaaacaaaaaactgctacgagtaaaaaaggggtcgttggcagtaaaggtaatacggcacctgcaataccaagcgctgtaaatattaagccaatgacgattaaaataagtcgcattgtaaaaactccattctagtactaatgcgcatgtaatattgttttagtaatataaatcatgctaaatataatgtgtatgataagtgcaatgactcagtaaaatgaaacgttgttgaattatccttgtcccattaacgcattttaagtgcgactttcataacaaataaactatttaatgagaatcgttctcaagtattatagttatattatgtgttttatttttgaaaagtgcaatatgttttcgaaaataagattatttttatgtgcaaaaacgacgcaaaagttttaaaaatgagacttctgtgagctgattattttataaaatgtaaacgcttactatataatgtgaatcatatcgtttaaaagcattattaaatatgatgctaagagatttatattatagccaataaacaaaggagagataatatggcagtaaacgttcgagattatattgcagagaattatggtttatttatcaatggggaatttgttaaaggtagcagtgacgaaacaatcgaagtgactaatccagcaactggagaaacactatcacatattacaagagcaaaagataaagatgtcgatcatgctgtcgaagtggcgcaagaggcatttgaatcatggtcattaacttctaaatcagaacgtgcacaaatgttgcgtgatattggtgataaattaatggcacaaaaagataaaattgcaatgattgaaacattaaataatggtaaaccgattcgtgagacaacagcaattgatattccatttgctgcaagacatttccattatttcgcaagtgttattgaaacagaagaaggtacagtgaatgatatcgataaagacacaatgagtatcgtacgacatgagccgattggcgtcgtaggtgctgttgttgcttggaacttcccaatgctattagctgcatggaagattgcgccagccattgctgcaggtaatacaattgtgattcaaccttcgtcttcaacaccattaagtttattggaagttgctaaaattttccaagaggtattacctaaaggtgttgtcaatatactaacgggtaaaggttcagaatcaggtaatgcaattttcaatcatgatggtgtagataaattatcatttacgggctcaactgatgtaggttatcaagttgccgaagctgcagcaaaacatctagtacctgctacattagagcttggtggtaaaagcgccaatatcatattagatgatgctaatttagaccttgcagttgaaggtattcagttaggtattttattcaaccaaggtgaagtatgtagtgcaggttctcgattattagttcatgaaaaaatctatgatcaattggtgccacgtttacaagaggcattttcaaatattaaagttggagacccacaagatgaagctacacaaatgggtagtcaaactggtaaggatcaattagataaaattcaatcatatattgatgcagcaaaagaatcagatgcacaaattttagcaggtggtcatcgtttaactgaaaatgggttagataaaggattcttctttgaaccgacattaattgctgtgccagataatcatcataaattagcgcaagaagaaatatttggaccagttttaacagtgattaaagtgaaggacgatcaagaagcaattgatatagctaatgattcagagtatggtttagctggcggcgtattttctcaaaatatcacacgtgcattaaatattgctaaagctgttcgtacaggacgtatttggattaacacttacaaccaagtaccagaaggcgcaccatttggtggttataaaaaatcaggtatcggtcgagaaacttataaaggtgcgttaagtaactatcaacaagttaaaaatatttatattgatacaagcaatgctttaaaaggtttgtactagaataaatagcgtttctgaagcgtgtttgtaggcagtctagcggtaagtcttagcatgtttacggagttgtttagattttaagcgaaaccaaatatttaggtacatgcataatgatattaggatataatgactaaaataatagcagtaggatggtttttaattgcaaaccatcttactgctgtttttaattacgctaatttgcgatgcggctataattaggacagagttgtttattaattatggtgatttagaaatatgaagttcaatatgcaaagtcatcgtttgttttaatatgtggaacaatcttaaagctattgcgattttttgaacttaatgaaactaaacaataaatttgagatacttttttgtcatttttatgtaactaacacaataatctcgtacattattaaaaatttctatatgatagggataaagcaaagcgcgagtgtgctgtaaaagtttttccaaggtgatattacataaaggtataaagggtaaagattaatgagttgtcatgtgaagaacgatggtgtataaatcatggttaattacggaagcattaatattaatctgagaagctataaagaattatttttaaaagcgacaatattaaatacgacgcatttatttaggagtggcaaacgtatgaatgggaaaaaggcgaatacgataaacagatacaaatattttcatcatgtcaatcatcaaaaaattcaacaaagttctaaaaagacgctgtgggcatcacttatcatcacattgttatttacagtgattgaatttgtcggaggtttagtatctaattcattggcattactgtcagattcatttcatatgcttagtgatgtattagcacttggtttatccatgttggccatttattttgcaagtaagaagccgactgcacgatacacatttggatatttaagatttgagatattagctgcatttttaaatggtttagcattaattgtaatttcaatctggattttatatgaagctattgtacgtattatttatccgcaacccattgaaagtggcattatgtttatgattgctagtattggtttactcgtcaatattattttgactgttatccttgtaaggtctttaaaacaagaagacaatatcaatattcaaagtgcattatggcatttcatgggagacttattgaactctattggtgtcatcgttgcagttgtattgatttactttacaggatggcgcatcatcgacccaatcattagtattgtaatttcactcatcattttacgtggtggttataaaattacgcgcaatgcgtggttaattttaatggaaagtgtgcctcaacatttggatacggatcaaattatggcagatattaaaaacatagatggcatattagatgtacatgaatttcatttgtggagtattacaacagagcattattcattaagcgcccatgttgtgttagataaaaaatatgatggcgatgattatcaagcgattgatcaagtatcatcattgttgaaagaaaaatatggcattgcacattcaacgttgcaaattgaaaacttgcaattgaatccattagatgagccatacttcgacaaattaacataaataaaacattgtagcgcctaagacattgattgatgtctcaggcgcacgttttgttttggattatgttgcatcatttaaatgattttcgtcaatttctttgatgctatctacatctaacacgacatctttaggtttcaaaatatgaatatgtttttcatcatttgtatgtaaaatgcgttctatgatgtatctttgaccggccattgtttctacagcaatctttttgtttcttgctaaacttgctacgacggattctttatccataatgatagccccctatatatatgtttatttacttataccctaacatgatttttatactctttgaaaatatattttacagaattttatctaaatatttaaaaaaatcgctcaatatacttataatctgataagaattatagtaatattttttcaaccattgttataggaggtcttattaatgacattatttttattagaagctaacaatcttgattttgcatcaacgaaagaagaactagaagcaaaggcagcatcactatctacgaagacaattccaacattaattgaagtacaagctactgaaaatttaactcatggttattttattgtagaagcaaatgacgaagcagaagctaaacaatttttaaccgaagctggtattagtattcaattagtcaaagaagttcgcttagttggaaaagatttagatgaagttaaaaatggtgatgcacatgttgattaccttgtaacttggaacattccagaaggcattacgatggatcaatatttagcacgtaaaaagaaaaattctgttcattatgaagaagtaccagaagttgaatttaaacgcacatatgtatgtgaagatatgtctaaatgtatttgtttatacaacgcacctgatgaagaagcggtacgtcgcgcgcgcaaagcagttgatacaccgattgatggcatcgaaaaactttaataagacaacaaattgatgagatatatgtatataggtttggcgtggattacgatggcagttaattagaatagctcaatgctataaatgtaagtagttgatatggcaaaactaatgaactatatgcaattattggctaaaacaattattttattgaaattttgtagagctgaaattaatataacgtcgttaattgaataacgcttatgttataagagcgctcgcaccaaaccataatcatctatagatataacaattcacgattcaagggctgtgtttggcatagccctttagatatacatttaattcttattaaaacggtagggattaaaagggggcttgtcatgattaaaattcaacaattacaacatcactttggatcacataaagtaattcataactttaatttggagattagcaagggagaaatagtcacttttatagggaaaagtggttgcgggaagtctactttactcaatatcatcggtggatttatttatccatcatctggtcgtgtcattattgataacgaaattaaacaacagccgtctccagattgtttaatgctatttcaacatcataatctgctgccatggaaaacgattaatgacaacattaggattggattccaacagaaaattagtgatgaagagattaacgcacagcttaaattagttgatttagaaggcagaggaaagcattttcccgagcaactgtccggaggtatgaaacaacgtgtagcattatgtcgagcgcatgtgcataagcctaacgttatattgatggatgagccattaggtgcattagatgcgtttacacgctataaacttcaagatcaactagtgcaactaaaacacaaaacggaatcaactattatcttagtcactcacgatattgatgaagctatttatctttccgaccgcattgttctattaggagaaggatgcaatattatttcgcaatatgatattacagcatcacagccacgcagtcgcaatgatagccacctgcttaaaattcgtaatgatattatggaaacatttgcattgaatcatcatcaagttgaacctgaatattatttataaggagtgagtgacgatgaaaaggttaagcataatcgtcatcattggaatctttataattacaggatgtgattggcaaaggacgtctaaagaaccgtctaaaaatgcccaaaatcagcaagtgattaaaattggatatttgccgattacacattcagctaatttgatgatgactaaaaaattattatcacaacacaatcatccgaaatacaaactagaattagttaaattcaataattggccagatttaatggacgcattaaatagtggtcgtattgatggtgcatcaactttaatagagctcgcgatgaaatcaaagcagaagggctcgaatataaaggctgtggcattgggtcatcatgaaggcaatgtcattatgggacaaaaaggtatgcacttaaatgaatttaataataatggcgatgattaccattttggtataccgcatcgttattcaacacattatcttttacttgaggaattacgtaaacaattgaaaattgaaccgggtcatttcagctatcatgaaatgtcgccagcggagatgccagcctcattaagtgaacacagaattacagggtattctgtagccgaaccattcggtgcactgggtgaaaagttaggcaaaggtaagactttgaaacatggtgatgacgttatacctgatgcgtattgctgtgtgctagtactgagaggcgaattgcttgatcaacacaaggatgtagcgcaagcatttgtacaagattataaaaagtctggctttaaaatgaatgatcgcaagcaaagtgtagacattatgacgcatcattttaaacaaagtcgtgacgttttaacacagtcagcggcatggacatcctatggtgatttaacaattaagccatccggctatcaagaaattacgacattggtaaaacaacatcatttgtttaatccacctgcatatgatgactttgttgaaccgtcattgtataaggaggcatcacgttcatgacacgtctcacaattaataaaattatattacctattatcacatttattattttcttaggcatttgggaaatggtcattattattgggcattaccaacctgtattgttacctggtcctgctcttgtaggaaaaagcatatggactttcattgttactggagaaattttccaacatttagcaattagtttatggagatttgtagcgggctttgttgtcgcattgttggttgctattccattgggctttttgctcggaaggaatcgttggctatacaacgctatcgaaccactatttcaattgattaggccgatatctccaatagcttgggcgccatttgttgttctatggtttggtattggtagtttgccagcgattgcgattatttttatcgctgcttttttcccaattgtgttcaataccattaaaggcgttagagacattgaaccgcaatatttaaaaatagcggcaaatttaaatttaactgggtggccattgtatcgcaatatattatttcccggggcatttaaacaaatcatggctgggatacatatggcggtaggaacaagttggatatttttagtttctggtgaaatgattggtgcacaatcgggattaggttttttaatcgttgatgcacgaaatatgttgaacttagaagatgttttagcagcaatattctttatcggattatttggttttattattgatcgattcattagttatattgagcagtttatacttagaagatttggtgaataaggagagatgatgatgactttagaaacgcttatcaaagaacaattagatcctcatttagtagaagttgatgaagggacgtattatccgagaacatttatccaacaattatttgtagatggctattttggtgaagcgacactgagaaaaaatgctgaagtaatcgaagctgtatcgcaatcttgtttgacaacaggtttttgtttatggtgccaattagcattttctacgtacttagaaaatgcaccacagccacatttaaataatgacttacaacagcaattgttatctggagaaatattaggtgctaccggattgtctaatccgatgaagtcatttaatgatttagaaaagttgaaccttgaacacacttatgttgatggacaattggttgtcagtggacgtatgccagcagtaagtaatattcaagaagaccattattttggtgcgatttcgaagcatgaatcatcagaagaatttgtcatgttcattctacgtgccaatcaagatggtatcactcttgttgaaaaaacaaactttttaggagtaaatggctcggctacatatcaaattactttgaatcaagtcgtagtgccacaatcacaaattatcacgcatgatgcgaagcaatttgcggcaactattcgcccgcaatttattgcttaccaaattccaataggattaggctcaattaaaagttctttagagttaattgatgcattttcaaatgcgcaaaacggaataaatcaatatttagagtatgatgttgaagcttttaaaaaacgttatcgtcaacttagagaggaatattatgcaatattagatgacggtaacttaacttcacatttaaatgaattaatatcattgaagaaagacatcggctatttattgctagatgtgaatcaagcttctgttgtcaatggtggctcaagagcatatacaccatattcaccacaagttcgcaagttaaaagaaggattcttcttcgcagcattgacaccaacattaagacatttaggtaaacttgaagcagagttgaatagctaactgaattaagatggtgcataattttattcgtcgaaaactactaccgttttatagatggtagtagtttttttagtgcgattacgcatttaaaattaagcgcctaaattataatacaacgttcgggcacatatgtgttcacttacgcaattattgataaatttcaatcatctggaataatatataattagagagtgggatagaaatgataaagaatcacaaatgatctattatgtagtggttcttacacattagccacagctaatgtgtacttaaaaaggaatacatgagtaaaactcatgcataagaaatactaatttctaaagaaaaagtatttctttatattggggcccgcatcaacttgcacattattgtaagctgactttccgccagcttctgtgttggggcccccaccccaacttgcattgtctgtagaaattggtgttccaatttctctatgttggggcccccgcatcaactactgctatatagttatatattaaataagtattaagaagttgaacgagtatgtcttgagtgaaatgtacaatttttgtgaaaatacgtgaaaaatcaggagtccataaatattgagctggttatacatgtcgagtgaggtgtagacatcaatgaagcgattaagtacaacattgaaagtacgattaattagtaattttttacaattgattattacgacagcgtttatcccatttatagcattatatttaactgatatgttaaatcaatctatcgttggcatatatcttgttgtcttagtgattttgaagtttccgttatctattatttctggctatattatcgaaatatttccaaaaaagtctctcgtgctgatttatcagttgacgatggttgttatgttagtgttaatgggcatatttagctctaaccagctatggcaaatcatctgcttttgcattgcatacgctatattcactatcgtttggggcttgcaatttccagttatggatacattaattatggatgcaataacggaagatgttgaacattacatttacaaaatgagttattggattacgaacttatcggttgctatcggagctttgttaggtggattaatctatggtcatagtatgttgatacttttcttagtcgcggcatgtatttttttaattgtactggtgattttatatatttggttgccagaagaccaaaatcaatcagtacgaactgttgctaatgcgcaaacgcctttttatcaacaatttcatattttgaaagtgttgcgtagttataaatcagttttaaaagatcgaaactatatgttaatgatttcaggattcagtattttaatgatgggtgaattctcaacatcttcgtatattgcaattagattaaaaaatcaatttgagaccatcagcataggtccttatgatattacaggggcaaagatgttagctattttactcatgaccaatactattggtgtcattgtactcacgtattttatttcaaaagttgtattaaaaatagattttaaaatagctttagtgttcggtttactattttatattgtcggttatagtggaatcacgtatctcaatcaatttagcttgctcatcttattcatgatgattgctactataggcgaaatcgtttattcgcctatatttgaagagcaacgctttaaaattattccagaagataaaagagggacatatagtgcttttcatgcattaggtattcatatgtcggaaacattagcgaggttagggattgtcttgggtgtgttcttaacctccttacaaatggggctgtgtatgtttatcttgttagtaatgggtgctttgttacttgttacaggtgtatttagaggacgaaagaaagtaagcatagattgaatttgctgaaacatttatttaataagtctctttatattgaaaacctattaatttggtcgtgattaaaatagagataaatttattaagaatttgttaaaatttaaggataacaattgttttatgcgagttgtttgtttaatataaacttgcttcatggatattttgcaacaacaatattgaatttgcaatgagatgtgaacaagagaaagtgattaacgagttgtagtgtgctatttatcgaagatgtatgtaatttacattgaaaaatataccaattgtaacgatgatacaagatgtattttagggtagaatatatcgctcatatgttgcgaatggtgttttatattaatcattacataacgagttaattaacatttcgtcggttatcatatcatcatgcaatttcaataagtaatgagtattatgatatgaaagaaggactttttatgattatgggtaatttgagatttcaacaggaatattttcgtatatacaaaaataatacagaatcaacgacacaccgtaatgcgtattgggttaaactcgctaaaaatgttgaagctactaaaatgatgtatgcattatcgacaattgtgcaacaacatgcatctataagacatttttttgatgttactaccgatgacaatctaacaatgaaacttcatgaatttctgccttttattgagataaaacaagttccatcttcttccgcaaactatgatttagaaactttttttaagcaagaattaagtacttaccattttaatgattcacctttattcaaatttaaattgtttcagttcgctgatgctgcatatatactattagattttcatgtgtccattttcgatgatagtcaaattgatatttttcttgatgatttatgcaatgcatatcgtggcaataatgttattaacaataatcgacagcatgcacatttaaatagaaatgatgataaagacaatcaagatgcatcgcatatagcattagactcaaactattttcggttagagaataactctgacatccatattgatagttatttaccaattaagcatccatttgagcaagctttatatcaaacgtatttgattgatggtatgacatcaatagatatggcatcgttggctgttagtgtgtatttagctaatcatataatgagtcaacaacatgatgtcacattaggtatacatgtaccatcacatttacccaatgatttacacggaaatattgtgccattaacgttaacaatcgatgcaaaagatgtatgtcaacgttttacaaaagattttaataaatgtgtgttgcaaaatatgtcgcaattacagtgcgcgaagtcttcgctttcattagagaccatttttcattgttatcatcaaatgatgtcttgttgtaatgatgttattgaggatgtacatcaaatacatgatgcacatacatctttagcggatattgaaatttttccacatcaacacgggttcaaaattatatataacagtgcagcatatgatttgctctcaatcgagacgctgagtgacttagttcgaaatatttatttgcaaattactgaagaaaatggaaatgaacgaacaactgtagatgaacttaatttgatgacagaacgtgatattcaattatatgacgatatcaatttaagtttgcctgagatagatgatgcgcaaacagttgttaccttatttgagcaacaagttgaagcaacgccgaatcatgtcgctgtgcaatttgacggagtgtttataacatatcaaacattgaatgcacgcgcgaatgatttagcacaccgtttgagaaaccagtacggtgttgaacctaatgatcgtgtcgctgtcatagctgaaaaaagtattgagatgataatagcgataataggtgtgttgaaagctggtggggcttacgtgccaattgatacgaactatccaagtgatcgtcaggagtacattttaaaagatgcaacgcctaaagttgtaataacgtaccaagctttatatgaaaatggtaaacaaaatattaatcacattgatttgaacaagatagcgtggaaaaatattgacaatctttctgaatgtaacacgttagaagatcatgcgtatgttatttacacgtcggggacaactggtaaccctaaagggacactaattccacaccgaggtattgttcgcttggtccatcaaaatcattatgtaccattaaatgaaaagacgacgattttgttatcaggaactatagcctttgatgctgcaacatttgaaatatatggtgcattgctcaatggtggaaaactgattgttgctaaaaaagaacaattattaaatccaatagcgttagaacaattgatcaatgaaaatgacgttaatactatgtggttaacctcctcattatttaatcagattgctagtgaacgaatagaagtattggtaccgttaaagtatttattaattggtggagaagtattgaatgctaagtgggtggatttgcttaatcaaagaccgaagcatcctcaaattattaatggttatggaccaactgaaaatacaacatttacaacgacgtataatatacctaacaaagttccaaatcgtattcctattggtaaaccgattcttggtactcatgtttatatcatgcaaggcgagcgtcgctgtggcgttggtattcctggagaattatgtacaagtggctttgggttagctgcaggttatttaaatcagccagaattgacagcagataaatttatcaaagattcaaatataaatcagctgatgtatagaagtggagatatcgttcgtttgttacccgatggcaacatagattatttatatcgaaaggacaaacaagttaagattcgagggtttaggattgagttgtcagagattgagcatgcgctcgagcgtatacaaggtattaataaagctgttgctattgttcaaaatcatgatcaagatcagtatatcgttgcttattatgaagcgatgcatacattatcacataataagattaaatcacaattacgtatgaccttaccggagtacatgataccagttaattttatgcatattgagcaaattcctattactattaatgggaaattagataagaaggcattgcctatcatggactatgtcgatacggatgcctatgtagcaccgagtacagataccgaacacttgctatgccaaatttttgcagatattttacatgtgaatcaagtaggtattcatgataatttctttgaattaggtggccattccttaaaagcaacgttagtggtgaatcggatagaggcatctactgggaaacgattacaaattggtgatttattacaaaagccaactgtatttgaactagcgcaagcgattgctaaggttcaagaacaaaactatgaagtgattcctgaagctatagttaaagatgattatgtgttgagctctgcacaaaagcgaatgtatttattatggaaatcaaaccataaagatacggtgtataacataccttttttatggcggttatcatcagaacttaatgtagctcaattgcgacaagcagttcagcatttgatagcgcgacatgagattctacgaacacaatatattgttgtagatgatgaggttcgacaacgtattgtggcagatgttgtagctgactttgaagaagttaacacgcattttacggatgaacaagaaatcatgcgccaatttgtggcaccttttaatttggaaaagccaagtcaaattagagtgagatacattagaagtccattacatgcatacctgtttatagatacacatcatatcattaatgacggtatgagtaatatacaattaatgaatgatcttaacgcactttatcaacataaattattgttaccacttaaattgcaatataaagactatagtgagtggatgtcgcatcgtgatatgacgaaacatagacaatattggttatctaaattcaaagatgaagtacctattttaagtttaccgacagactatgttagaccaaatattaaaacgacaaatggagcaatgatgtcatttacaatgaatcaacaaacgagacagctacttcaaaagtatgtagaaaagcatcaaattactgattttatgttctttatgagtgtggtcatgacgttgttaagcagatatgctcgaaaagatgatgttgttgtcggtagtgtaatgagtgcgcgtatgcataaaggcacggaacaaatgctaggcatgtttgctaatacgttggtatatagagggcaaccgtcacctgataaaatatggacacagtttttacaagaggttaaggaaatgagtttggaggcatacgagcatcaagaatacccattcgaatgcttagtaaatgacttagatcaatcacatgatgcctcacggaatccattatttgatgtcatgttagtactacaaaacaatgaaacgaatcatgctcattttgggcatagtaaattaacacacattcaacacaaatcggtgacggcgaaatttgatttatcttttatcattgaagaagatcgcgatgactatacaatcaatatcgagtataataccgatttatatcactcagaaacagttcgtcacatggggaatcaatgtatgattatgattgattatattttgaagcatcaagatacactacaaatttgtgatataccaaatggcacggaggaacttctaaattgggtcaatacgcatgttaacaatcgaatgcttaatgtcccgggaaataaatctatcataagttactttaatgaagttgtttcacgacaaggtaatcatgttgcgctagtcatgaatgatttgacaatgacatatgaaacattacgtaactatgtggatgccattgcgcacatgctcctatcaaatggtgtgggcaatggtcaacgggttgccttgtttacagaacgtagttttgaaatgattgcggcgatgttggcgacagttaaagtaggtgcatcttatatacctatcgatattgattttccgaaaaagcgacaaggtgcaattttggaggatgctaaagtaactgcagtcatgtcttacggcattgaaattgaaacgacattaccagtcattcaattggaaaatgctaaaggttttgttgaatcaaaggaaaatgaacaatatgatgatttacatggcgatcaacttgaaaacacagcgatgttagataatgagatgtatgctatttacacatctggtacgaccgggatgcctaaaggggttgccatacgacaacgaaatttgttgaatttagtgcatgcatggtcaactgaattgcaattaggcgacaatgaagtatttttgcaacatgcaaatattgtttttgatgcatcagttatggagatttattgttgtttgttaaatggtcatacgcttgtgattccagatagagaggaacgtgttaatccagcacagttacaacaactcattaataagcatcgtgttacggtggcatcgattccattacagatgtgtagtgttatggaagacttttatattgaaaaattgattacaggcggggcaactagtacggcatcctttgttaaatatattgagaagcattgtggcacgtatttcaatgcctatggaccatctgagtcaacagtcatcacatcgtattggtcacatcaatgtggtgatttgatacctgagacgattccaattggcaaacccttatctaacatccaagtgtatattatgtcagatggtttgttatgcggtattggtatgccaggcgagttgtgtattgcaggtgatagtttagcgataggatatattaaccgtccagaattaatggctgataaatggcaaaataatccatttggtaaagaaaagttgtatcatagtggtgatttagcacgttatacatctgatggtcaaattgaatttttaggaagaatagataaacaagtgaaagttaacgggtaccgtattgaacttgatgaaattgaaaatgcaatattagctattcgtggtatatctgattgtgttgtcacagtaagtcactttgatacgcatgatatattgaatgcttattatgtcggagagcaacaagtggagcaggatttgaagcaatatttaaatgatcatctgcctaagtatatgattcctaagactataacgcatatcgattgtatgccattaaccacgaatgacaaggtggatactacgcgtttgccaaatccatcacctatacaacagtctaataaagtgtatagcgaaccatctaatgaaattgagcagacatttgttgatgtattcggagaggtattgaaacaaaatgatgtcggtgttgacgatgatttctttgaacttggtggtaactcattagaggcgatgttagttgtctcgcatttaaaacgatttggccatcatatttcaatgcagacattatatcaatataaaaccgtgcgacagattgttaattatatgcaccaaaatcaacaatcattagttgcattaccggataatctttcggaattacaaaacatagttatgactcgttataatttgggtattttagaggatagtctaagtcatcgacctctaggaaatacactattgactggtgctacagggtttttaggtgcttatctgattgaagcactacaaggatacagtcatcgcatttattgtttcgtacgtgctgataatgaggaaatagcatggtataagttgatgacgaatttaaatgattatttttcagaagagacggttgaaatgatgttatcaaacattgaagtcattgttggtgattttgagtgtatggatgatgttgttttaccagaaaacatggatacgattattcatgcaggtgctcgtacagatcattttggtgatgatgatgaatttgaaaaagtaaatgttcaaggtactgttgatgtcatacgtttggcacaacaacatcatgcaaggttaatatatgtgtctacgataagtgtgggaacttattttgatatagacacagaagatgtgacattttcagaagcggatgtctataaaggacaactactaacatcaccatatacacggagtaaattttatagtgaattaaaagtattagaagctgtaaataatggcttagatggtcggattgtacgtgttggtaatttgacgagtccttacaatggaagatggcatatgagaaatataaagactaaccgtttttcaatggtaatgaatgatttgttacaactgaattgtatcggggttagcctcgctgaaatgcctgtagatttttcttttgtggatacgactgcaagacaaattgtcgcattagcacaggtcaacacaccacaaatcatttaccatgtgctatcacctaataaaatgccggtgaaatctttgttagaatgcgttaagcgcaaagaaattgaactcgtcagtgatgaatcatttaatgaaattttacagaaacaagacatgtacgaaacgattggattaactagtgttgaccgtgaacaacaactagcaatgatagatacaaaattaacattaaaaataatgaatcacatcagtgaaaaatggccaacgataactaacaattggctgtatcattgggcgcaatatatcaaaacaatattcaataagtaagtagggaaagttatgacagtatttgtaatgcaattacagagtaacttgaaaagtattgaagaattaatatcacaaagtcgttggtcatataaaaaaccgcgtacagtcaactatagatacaatcaagataaactcatgcacagattgggagatattttagtgcaatatggaattcaacatgacacagggttattaccacatgaatggcattatcacatttcgccacgaggtaaggcagatatagttcaacacaatcgtgatggacagcccatctatgtgagcttatcatatagttatccttatatcgtgtgtgttgtcgataaagaaccagttggtattgatatcgaaaagatatcacaacgtttagactggcgtacattagtgacgtgtttctctacaaacgaagcacagcaaatatgtagtttaaatgatttttatcaaatatggacacaaaaagaaagttttacaaaattgattggtgaaggtttaatcaaagggttggacatttatgatatgacgcaatcacacttttatcaatcacgtgaagtgaagttcaaacaatttatttttgatcagtttatggtacaggtatgtttcttaggacaggcaccctggggttataaaaaagtgtctgtatttcagttattgagcagttaaacatggcgtctaacagttttatttggcaatgagtttgaaaaactacatgctaaatgacatactgttagatgtttttttattggaaaaatgaaaggtgaatacacgatggcatcattcaaaatcatgacgagattaaagtaagtgataaggtgaaaatatactgagcaatattgaaattgccaaaaataatggcttgttacgacgcatttgagattttaatgctcacgtaagttggctggaatcatatcatgtcagttaataaaataacgtgagcatcaatcatcatactcaaacgatgatttaaaactcacgttacgatgtttatatgaattaatttaatttatagcgatagacaaaatgttgtcgtactaattcaatagtcatcatccagacgacatgtccaaataattctgatatgtgctcttggaatggttgatcccacacagcaggtacagtatgcataatcggcataatgataaggtggaataacacccatattacaataccaaatacagcaccttgtcccattgctaagtaagcgtattttttaactaatatgcaataaataattgcaatgacgatagaaaaactaaagtgaacaatgaagcttacccaaggtaattccatatttgaaaatgtatacgtctgatgtgtaaattcactactaaatcctaattgttgcaataactcttgaggtgggtttgttgcatttcgttctggtgtacgaggtggaaacatgacctcccaacctaattttacaattccagacaacaagccaccaatgattccggcataaatgaatattatcatttgtcgtttcatcaacttaaggacccctctcttttttctatcctcattatagtattttgtgaaaataatcacaatgaaaaacttttaaaatataaaatatttcaagttacaaatttgaaaatcactaatagtgtttttcatctcaaattgtatcatactatattctaagatttcttttgtgaaatgagacaggtgaaaaggtgacgctgcataatcattaaacaaattaggtacaattatgtttcgaagccgaataatacaagattgagtggtcttattcaaagtcatactaatgattttagtatcgttgtcccaacaaaatcattattgtaaatagcttcgataatatttggcttgtttcctgatgcaataataactttaggacagccattttcaatagcatttttagcatcaagcactttgggaatcatacctccataaatatcaccatgctcaatatactgattaatatcagctaatggtagttgaggtataacaacatcattgattagcacgccagcaatattacttagtacataaatgggtgcttctaatgatgctgcaataaaataggcgagtgtgtctgcatttatgttgtaaaattctccatcatggttattgaaaccaatcgaattgatgataggtacaaatttagtacataaataagacaatgagtctatatttaaagtggttggaaccccgacatatccatattgttgatcaaaacgtttaatttcaaataattgagcatccaaaccacataagcctattgcagaacattggtgctggttaaattgacctactaatgcagtgttaacgtctgcaatgagcgtgtgtttagtaatagtcatggttgctttatcagtcactcttaggccattaacaaagtgtggctcgatttgctggtttgataatgcttcattaataaatgggccaccgccatgaacgataatggggtagatgttgtttgatcgtaaatgcttaatgttgttaataattgatggatgcatgtcacttagtgtactgccaccaattttaatgacaataaatttcatctaaccaacaccaccttatgttcgatatgatgcgttaatacgcacataatcataggataaatcacaaccgtatgcagtcgctgcagcgttacctaaaccaagctgaacgtcaattgtgacattttcatgagttaatgtattcgacatagcttgctcatcaaatagtacagccatacctttatccacgacaggtatttggttcagttgaacatatgtgcagttaggatcaatttcacatccgctgtagccaatagctgtaatgattcgaccaaaattagcatcttcgccaaaaatagctgattttactagatttgaacttacgatagttttaccgatttttcttgcgtctgatattgatttagcgcctgaaacattgacactgattaactttgttgcgccttcgccatctctggctatagctttagctaaaaatgtacagacaaaattgaatgcatcaacaaatgtttcccattgtggatggtcttgattaagtatttggtgttcaacttggtgatttgccatgactaataccatgtcatttgtacttgtatcgccatcaacagtaatcatattaaatgtatggtcagtcgaagattttaataattgatgaagtgtattcgattcaattgatgcatcggttgttataaaagcaagcatggtagccatatttgggtgaatcatacctgatcctttagcactgccaccaattgtaatggttttaccatcaatatttagtgatacagcgatatgctttgtacatgtatcagttgttaaaattgcctcgttaaacgcacctggcgttgcaaaattagcatcattaatatgttctgtaccagttttaattttatccattggtaaatattctccaatgaccccagttgaagcaacagcaacatgctcagatggtatttgaagttgttgagcaacccatgtttgagtttgttgtgcatcatcgataccttgctgacctgtgcaagaatttgcattagctgaattaacaacaagtgcttgtaatttcccgttagacttttgtaaagtgtcttcagtgacaataagtggtgcagctttaaattggtttaaagtatatacggcagctgaacttgctaaagacgatgagtaaatccagccaaagtcttgtttgttagcgcgtaaaccgatgtgcataccaccggccgtgaagccttgaggtgtactgatatcgccatgtttaataattgaaaagttatgttgctgtgatgtcgtttcttgatgtttcattctaacaccccttatggataaactggtgattgttttaggccagtcgtaacttcaaaatcatataatatatttaagttttgaatggcttgaccacttgcccctttgacaaggttatcaatcactgatactaaaattgctgtttgcgttgtttcatctacatagatgccgatatcgcagtagttactaccgagtacttcttttgtggttggaaaagtcccaatatctctaattctgacaaatggctgattagcataataagaggtcattaatttatgtaatgattcagtcgtatattcagatgataatttgacatatattgttgataaaatacctcgtgtcattggtacgagatgtggtgtaaatatgactgatacatcttgacccgcaatgatagataaatattgctcgatttccggtttgtgtttatggtttccgattgcataagcgcttagattttcattcatttctgaaaaatgaacacgttgtgataatgaacgaccagcacctgacacgccggtcttagcatcaataataatagatgacaaatctacaattttttcgctaataagtggatgtaatgctaataacgttgctgtagggaaacagccagggttagaaatgagtttcgttccattgttatctaaagattgccattctgaaatgctgtaaatagcatgatccaaatcaacttgtgctgcagcagtttccttgtaatatgcttcatatatttcacgattcttaattctaaatgcgccagataaatcgataacatgaatacctttttctactaagggagggatacatgttttacttacgggtgctggtgtcgcaaagaaaattacatcacagtcattattgtccactgtaagtgcctcgaaatgttgcataatatgttgtaaatgtggaaatgttaatttcaacggttcatctacttttgaatgtgagtagatgtgtgcaatcgttacatgaggatgtgtttgtaataatcgaattaattcaattgcgccataaccgctaccgccaacgatacctactttaatcatcatgaatccctcctatatcatatataaatgattaattgttaatttttaaaaacgtcttgaaaagctgcaacaatttgattgatttcctctttatcaatgactagaggtggtgacaatcgaatgatagtacgatgcgtgtctttgcataagattccacgttgaatcagttgatccacaaaaggtgcagcatctgtgttaagctctatgcctataaataaaccacggcctctaatttctttaatactaggatgtttaagttgtagtaatgcttttaataaaaatgaacctaagcgttctgatcgttcaaccagttgttcatctttaagtacatcaagcgctgccgtcgatattgcaatggctaaagggttaccaccaaatgttgaaccatgtgtacctggtgttagaacacgcatgacatcattatttgcaagtacagcagatacagggtataagccgccacccaatgccttacctaaaatataaatgtctggaacaacttgctcccattccatagcaaaccatttcccagttctaccaagaccaacttgaatttcatctgcaatcaataatatttgatgtttatcacatagttgacgcacagcttgaatatatccattcggtggtatattaacgccaccttcaccttgaattggttccaaaataattgctgctgtattcggtgaaatagcttgtgttaattgttcaatgtctccaaaatctactgttgtagtgccttgaagtagggggtgaaatcctgctttatatgcgtcgtggttagatagtgataatgagccaagtgtacgaccgtgaaaattgttattcatagcgatgatttcaacttgtccgtcagtaatgcctttaacctcagagccccattttctagcaattttaatggctgcttcaacagcttcagtaccagagttaagggggagtactttgtctttcttagcaagatgacaaattttttcttcccatttcccgagattgtcactataaaggacacgtgaaatgatagacaactttgaagcttgttctgtcatcgctttaacaattgttggatggcaatggccttggtttgcaactgaaaaacccgagatgcaatctatatattgtttgccatcagtatcccaaactttgacacctttacctttagtaattacaagcttaagtggtgcataattattagagctataataatcagttaattcaatgattgaattcatcggtctccctcctttatatttatacaatttaaagaattaatataaatatattacagttgttcaatataagtgtcaaatgtaaatttaataatataaagataaagttgtgtatgtattaatgtgattcgtaaaatgaaagtactaatatttttcgtggataatcattgatatgtatacgagtgcagtttaatgtagtatgaataaaaaatgccacaagcatatgtttaacatatgactgtggcatagtattatgcttgtggaattttacgatgcttaattttataaataatgaagccgataatgaaaccaatcaaactgagaacaacccagcccataccaatgtctgataatggtaaatatttttggctgaaattaatcaaagtttgtgagaataatgtgcttgaaatgaactctggactagcttttaatccatctactaatgcagcaatcattgtaaagaaaatggtacattgataaataatttttgaatgatggaatttgctactaaataatgttagtacaatcaaggcaattgctaatggatataagaacattaacactgggactgagtacataataatcttagttaagccaacattcgcgaataagaatgagataaagctcacaactgttgcaatcgctaggtaattcattttagggaaaaggtgttcaaatgtttctgaaaatgccgtaattaaaccgatagctgtttttaagcaagcaaccataactatgagtgataacaagacgataccgtagttacctaagtagtattgcgtaatttgcgctaaggcaataccaccattttcactaagtttgaaatgaccaacacttaatgtacccatgattgctagtagggtataaatgatccccatcataatgatactgatagtaccagacttaattgtttctttagcgatatcagttggattttcgatacctaactttttaatcgttgcaacaatgatgataccaaatgccaatgacgctagcgcatctaaggtattgtatccatctaaaaagccgttaaataaggcgtttgattgatattgtttactaataggtgcatcagatatgccacctaatggatggataaaagcaaataataaaataattgctaataatactaagaataccggatttaaaaatttaccgatatattctaaaattcttgatggctttctcgcaaaaaaccatgcaatcacaaagaagacgaagctaaaaataaataaatataaagtgatttgctttggtgataaaaatggcgaaaatgcaatttcaaatgatgtcgttgccagtctaggtaaggcgaaaaatggtccgataactagatataaggcaatagtgaaaatataagcatatgttttattaacacgcgatgcaatttcaaataaaccagatgtctttgaaatgccaatagcaatgatacctagaaatggtaagccaattgctgtaattaaaaatcctaagttagcgataaaaacgttagaaccagcagcttgacccaagtgtattgggaagataagattgccggcaccaaagaataaaccaaataacatagaacctataaacatgttttctttaaatgttagtttcttcttcatatatgtatttgttctcctttttagaacttataaaaatctacttaattaagataatatcaaaaattaaacctaaagtgatacataattttgtaataaatactaaattttttgaaaattccggaatgaacactgtttttatgtagtaagggcgtaggttaagaacggattaacagatatagaatatgttaaatatagaaggttagacaacccgatgtattaatactttgtaaaataaagatagaggctgggacattaagttcttaggcaatgtaaaaaagctgatttctattaattatttgatagaaatcagctttttttaaatgtatttgataatatacagctcgtcgagctgctattttccttatattaagtgccattaatacaaaacctagctctcgtttaactttatttattcctcgaactgacattcgagtgaaacccaaaatagccttcataaatccaaaaacaggctctacatcaatttttctttgactatagatttttttcgtttctggttcagaaagcttttgattaatttgggctttaaagtattcccaattataattcttcatgattttcttattggatttcgaatttggcttcatgcattgttgcctcaaagaacatgctgaacagtcatcgcattcatatagcttgaagtcacgtttaaaaccatatctatcattacggtatgcatatcttttaaaacctattcttttgttattaggacatataaattcatcattaagttcgtcatatttccaattttgagtgttaaaaatgtcacttttaaactttctagttttatctttaataaacatgccatacgtaataagtggcgttttattaaaatcatctataatagccatatagttttgctcactaccataacctgcatcagctacaatatactccggtaaataaccgaaggtattttgaatcattgttaaaaatggaattaaagttctagtatctgtcgggttttgaaataggtcataggataaaacaaattgagaatttgtcgctatttgtaaattgtatcctggcttaagttggccatttttcatatggtcttccttcattctcataaaagttgcatcatgatcagttttagaaaagctatttctatctttaagaatcgatttttgttcttcatatttactttttctttcggaataatcatcaaatttctttttgaacttcttaatctcagttctttttttacgggtctgttttctaatttgagtacaatcttcgttctcaatagaatgatttaaatcttcgatttctttatctaaatgactaccaattaaatctatttcttctattgttaaatcgctatctccatcttcttttatctctggtattattttttcttcaactaagtcacgatataatgcttttgaattttcgttcaatttcgattcgtgattttgaatacttttcttccacacaaatgtatatctattggcactagcttctacttttgtaccatcaataaaaattgaattatcatcaataagattttgctttaaacattgactatggaactgaataaataaagattcaattaacgcatcagtattaggattcactctaaaacgattaatagttttataagaaggtgtttgatcttgagctaaccacatcattcgaatactgtcatgaagtaatttctctattctacgaccagaaaatacagattgagtatatgcatataagatgatttttaacatcatttttggatgataggatgttgcgccacgatgatgtctgaattcatcgaattcgctatcaggtatcgtttcaacaatttcattaacatatcgcgaaatatcattttgaggaattctaacagaagtttctattgggaattgatgtagcgtttcgttttgagcgctcatcatgtcagtaacaaaatactgatcgtagtttaattgataggcgtctcgtgctgtcgtatctacaccaacatgtgttgctacaccgccaagaacaatcgtatcaattcctcgacgtctcaactgtaagtctaaatccgttcctacaaatgcactaaattgtcgtttgtctatgacaaaatcgccatctctcttgtctaataaatgatggaaacgactgtagtcgtcgccttcttttggtggtaatgataccatcgaatttggtttcaatgcatctttaccatcatagaatttaacacgaacgaatacgataaaactattgttttttctgaaaacatctattaatttattagcgttttgaacgacattttcagctgtatatggggcataatccattttaagaataccttcttgcaggtcgattaacactaaagcggttttattaaaattaatcatcttatatcagagtccttttcgtttaataaagtattcgcttaaacttataccctaacgtgatgaaattatttattttgttgcgaaaaagctttagcgatatcgatcagtttctttggtgcatcttcgacagacattttgacttcgacaaaatgcatcacatcgggatggtcattaattacattaaacacctcttgtaaatcttttgatgattcaacgtcatgaattttaacatttttaccaccaaatacagctggtaaagctttataatcccacatgtgaatgtcattataaggttcatacatgccgtgaataagtcgttctaccgtatagccgtcattattaatcacaaataataccggtttaatatgctgtctaatcatagttgaaatagcttgaacagttagttgcaatgagccatcaccaattaataataagttacgacgatctttgtctgctaattgtgaacctaatgttgcaggtaatgtatagccgatagaaccccataacggttgccctataaaagtattgtttttgtataatgctaaatcataagcaccaaagaatgatgtaccttgatcagcaataatgacatcatttggttttaagaaattttgcatcattttaaaataagtttgttgtgttaatggctctgtgccaacagtataatcaggtgatgttggacgatgataagcagggaacgatgcgttattcgtatatgatatatcggtcaattgttgtagtaatgatggtagagatatttcatcatttgtaacatcatcaattttgatattgtgatgatttaacataacgacatcatcgatattgaattggtatgaaaatcctgctgttgctgaatctgttaatttggctccaatatttaaaattaaatcgctgttgtccacataatctcgtattttatcttcggcaattttcccatcgtaaatacccatataatatggattttcctcattaaaagcaccttttcctaatgaaagctgtgctactggtatctgtgtttgatttacaaaatcttctaattcttgatggaggtgaaaactgttaatttcatgtccagtaatgatgataggctgtttcgattgatgcaatttagatgctaataactctatatatgttgacgcatcagtatctttggctgccgttacttcgaatggtgtcggtatttcaatttcagagattgcgacatcgattggtaaatgtaaatgaactgggcgtctttcggcgattgctgtattaattaaacgtggtatttcggttgttgcattttcaggtgtgatataaccttgtgcaacggttatatgtgcaaacatttttcggtagtcgtcaaatgtaccttcaccaagtgagtgatgtacatatttaccggcttgttcaacagcacgtgtcggcgcacctgtaatcgcaatgacaggtatgcgttcagcatacgaacctgcgataccgttgacggcacttaattcgccaacaccaaatgtagtaactaatgcagcgagtccattaagacgggcataaccgtccgctgcgtaacttgcgtttaattcatttgtatttcctacccaatctacattgggattactgataatatcgtctagaaaagcgagattaaaatcaccaggaacaccaaaaattttatcgacgcctgctcgatgaatagcgtcaattaagtaagctccaatgcgttgtttcataaaaaaaccaccttttctctatatttacacttaaaatgatagcctcgaatatagtgtaaggtcaaggaagttgactttgttgtgaaaacgctaacaatagcgggcaattaatattttttaggaaatgaatatgaagggggcgttaattgatgatcttgaaattcaaaatttaaggggagagcgactatcaatgatgctgcaaaacacaatagcaaagaaaaaacaggcacgtcacctgataaaggcatacgcacctgttttagtaagtattatttagcttcaaataattgatcgccaaatgaaatgttgctatgttcaccttgtttgaaatcaaggtttgtaatgtttccttgtgtaacgataataggcgtaatatcactctttgcatgattgcggatgtagtctaaatcaaagttgattaataaatcaccttgtgtaacttcttgaccttcctcaacatgtaaagtaaagccttctccgtttaatttaacagtgtctaaaccgatgtggattaatagttctaaaccactatctgatacaagaccaattgcatgttttgttgggaaaatcatttgtactttaccgttgaatggtgcacgaacttcaccttgtgaaggtttgatagcgataccgtcacccatcattttttcgctgaacacttgatcaggcacttctgataatggtgttacttcaccagttaatggtgcatgcacgatatggctcaattcgcttgttgcagatgtatcttctgctacaacaacagtttcgtctttatcgtcttccatagtagtagggttttctactacttgaccattcataatctgttgcatttcatgtttgatttggtcagatttaggaccaaaaattgcttgcatattattgccgacttctaatacaccagatgcgcctaaatctttcaaaccaggaacatcaactttagatttgtcgttaacttcaacacgtagacgagtgatacaagcgtctaaatgtttaatgtttgctttgccacccatagcttctaatactgcatatggtaattcagttgctgaagcagtaacagcttgtgattgcttatcttcacgacctggtgttttgtattttaattttacaattaagaatcggaatacgaagtagtaaatgactgcgtatacaagacctacaggaataactaaccaccattgtgtcttattaggtagtacgccaagtaaaacgtagtcgatgaaaccacctgagaatgtataacctagatgaacatccaataagtacaatgttaagaatgataaaccatcaagtactgcgtgaataaagaataataatggtgctacgaataagaatgagaattctaaaggttctgtaataccagttaagaatgatgttaaagcagcagaacccattaaacctgctactactttcttgttttcaggtttagctgagtgataaattgctaaagctgctgcaggtaaaccgaacatcataactgggaattcaccttgcatgaatttaccagctgtcaaatgtgcgccttcacgaatttgttcgataaagatacgttggtcaccgtgaataatttcaccagctgcatttttccatgaaccaaactcgaaccagaacggtgcgtggaaaatgtgatgtagaccgaatggaattaataaacgcttaataaaaccaaataagaatacggcaacaccagtatttgagtctaataatcctgtactgaatgcatttaatcctgtttggattgttggccagattaatgccattgggaatgctaaaataaatgatgttgtagccatcataataggtacgaaacgcttaccagcgaagaaacctaaataagatggtaagttaatgttatagaacttgttataacaccaagctgccagggccccgataataataccgccgaacacacctgtttgtaatgttgggatacctaaaatgctagcgtaaccactcgctggatcagtaacatttttaggtgtaacttgtaaaaagtcacccattgttttgttcatgattatgtaaccgacaaatgctgcgatagctgctacgccatcaccgccagctaatccgattgcgacacctaatgcgaaaatcataggtaagttttcaaaaataatactaccggcagctgtcattaatttagcgacattttgaacgccaccattttgtataaaaggcaagtagtgttgtaatgcttcgccttgtatagctgtaccgatagctaataacagacccgctgctggtaaaatcgcaacaggtaacattagtgccttaccaatacgttgcaattgaccgaaaagtttcttcctcacttgtccaacctccaaagttgtatttattatttaagattcaataaaaaagacacgagcaaatagactgtgttggtaaccatcacagcttaatttaactcatgcctaatcttacttagtaacacgttggtgtatgtaattaatgtaaaagaagcaattgactaagtagtatataaaacggatacgttagtttatctagcttaccatcacatcttattgaatcttatttgtttgcgactcctattttagcatggtgaagtatgcgttttcaatacaattattaaattcaatttaaaatctcttaattgttcacagattattattaaaacataatataagataatcctgaataaaatgtataaaagttgttgtaataatccagcagtagcagctattatcagcacttaaaagaaaggataatctttgatggtgtaataattaacttgtgacagaaatatgtaagattattacaatgaacaggcttcaactgattaatattgtaatgtgttttctcttatagtaaaatgtaagcgattacacaactcaactatattttcctaataattatattgttaaggagggctactttgacaggcttttcagtgtatttaggacaacctttagatgaagcgtatattaagcgaatgattaaacaaggttaccaaatgatttttacatctgtacaaataccagaagaagatgacgagacaaaatatcattatttcacaaaactactcaatttattaaaacatgaacaagtgacttacctcatagatgctaatccatctatattaacaccatctttttatgagcatcttcgacaatatgatgcacaatttatgattcgtatcgatcatagtacatcaattgaggcaatcgaagcgataatggcacagggtttaaagtgctgtttgaatgcaagtattatttcccgggaattgttaacaagcttacatcaacaattgaatgattttacattactttcattttgtcacaactattatccaagaccagatacgggattatctgttgacttggttaataagaaaaatgaactcatttatcaatttaatccaaaggcacaaatatatggttttattgtagggagtggtttgcgaggtcctttgcataaaggcttgccaacaattgaagcaacgagacatagtcatcctgtcgttgcagctaaattattacaagaaactggtgtatctgaagtgttagttggagactcattgattgaaatgaggcaggcaaaacaacttatagatttttgcaagcataggcatttcacgttatgtattgaagaagtgtttgatacgacagtgacttaccttttcgatatgtgtcataaagtacgtccggataatccggaaaatgtcattcgttcggaaacgtcaagacaaatatgtccacattcgattcaaccacagtttacgacgcaacgacgcattggttcagtaaccgttgataattcgaataacggtcgttatcaaggtgaaatgcaaattgtgagacaaacgcttagtgcacatgacaatgtgaatgttgttgcacaaattattaaagaagacttaccactattaagttgtatcgagccgaatgatacatttgattttcaaaaaactagggagtgtaagaagtgatggaaaatagtacgaccgaagcgcgtaatgaagcgacgatgcatcttgatgaaatgactgtggaagaggctttaattacgatgaataaagaagatcagcaagtcccgttagcagttcaaaaggcaataccacaattgacaaaagtaattaaaaaaacaattgcacagtataaaaagggtggacgattgatctatatcggtgcaggtacaagcggaagattgggtgtcttagatgcagcggagtgtgtacctacattcaatactgaccctcatgaaattataggtattattgctggtggacaacatgctatgacgatggctgtagaaggtgcggaagatcacaaaaaattagcggaagaagatttgaaaaatatagatttaacatcaaaagatgtcgttataggaattgccgcgagtggcaaaacgccatatgttataggcggtttaacatttgctaacacaatcggtgctacaacagtatctatttcatgcaatgaacatgcagttataagtgaaattgcgcagtatccagtagaagttaaagttggtccagaagtattaactggttcaacgcgtttaaagtctggtacagcacaaaaattaattttaaatatgatttcaaccatcacaatggttggtgtcggaaaagtttacgataacctcatgattgatgttaaagcaaccaatcaaaaactgatcgaccgttcagtgcgtattattcaagaaatatgtgctatcacatatgatgaagcaatggcgttatatcaggtatctgagcatgatgtgaaagttgcgacagttatgggtatgtgtggcatttctaaggaagaagcaacaagacggttattaaacaatggtgacattgttaaacgagcaatcagagatagacaaccttaggagggatttaaatgaccaaagaacaacaacttgcagaacgaattattgctgcagtaggtggtatggataatatagatagtgtcatgaactgtatgacacgtgtgcgtattaaagtattagatgaaaataaagtagatgaccaagaactaaggcacattgatggtgtcatgggtgttatacacgatgaacgcattcaaattgtggttggacctggtacagtcaataaagtggctaatcatatggcggaattaagtggtgttaaactaggtgacccaataccacacaatcacaatgatagtgaaaaaatggactataaatcatatgcagctgataaagcaaaggcgaataaagaagcacataaagcaaaacaaaagaatggtaagttgaataaagtattgaaatcaattgccaatatctttataccgttgattcctgcatttattggagctggattaattggtggtattgcagcagtactgagtaacttaatggtggcaggctatatttcaggtgcttggattacgcaacttataacagcatttaatgtcattaaagacggtatgttagcatacttagctattttcactggtattaatgcggctaaagaatttggtgcgacaccaggacttggtggcgtgattggtggtacaacgttattaacgggtattgctggtaaaaatattttaatgaatgtcttcactggagaaccattgcaacctggacaaggtggaattattggcgttatttttgccgtttggattttaagtattgtcgaaaagagattgcataaaattgtgccaaatgcgattgatattattgtaacgccgactattgcatttttgattgtaggactattaactatctttatctttatgccattagcaggttttgtttcagacagtttagtttcagtagttaacggaattattagtattggtggcgtatttagtggatttatcattggtgcaagcttcctaccgttagttatgttaggacttcatcatatttttacgccaattcatatagaaatgattaaccaatctggtgctacttacttattgccaatagcagcgatggctggtgctggacaagtaggtgccgcattagcactttgggtaagatgtaaacgcaacacaacattacgtaatactttaaaaggtgcattgccagttggtttcctaggtattggagaaccattaatctatggtgtgactttgccattaggtcgacctttcttaactgcttgtattggcggtggtattggtggcgctgtaataggtggaattggacatattggtgccaaagcaataggcccaagtggtgtgtcactattaccattaatctcagataatatgtatttaggttatattgcaggattacttgctgcgtatgctggtggattcgtttgtacatatttatttggaacgacaaaggcgatgcgacagacagatttgttgggtgattaatgatgacaaatattttatatcgcattgataagcagttgagtgattttacgaagacagaaaagataatcgctgattacattttaaagaatccacataaaatcattgatatgactgtgaatgatttggcagatgttacgaatgttagtacagcatcaattgttagatttagtcggaaaatgacacatcaaggttttcaagagctaaagattgcaatatctcgatacttacccgaagatattgcaaccaatccacatttagaattgattgaaaatgaatctgtagaaactttgaaaaataaaatgattgctagagcaacgaatacgatgcgatttgtagctactaatattatggatgcgcaaattgatgcaatttgtgatgtgttgaaaaatgccaggacaatatttttatttggatttggcgcatcgagtttgactattggtgatctttttcaaaagttatctcgtattggcttaaatgtcaggttattacatgaaacgcatttacttgtgtcaacatttgcgacgcatgatgatagagattgcatgatttttgtgacgaatcaaggtagtcatagtgaattgcagtcaattgcacaggtggccacacattacagtattcccatcataactatatctagtacagctaataatccagtggctcaaattgcagactatgcattgatttatggcagaactgatgaaaatgaaatgcgtatggcggctacaacgtcactatttgcacagttattcacggtagatatattgtactatcgatttgtagcattaaattatcatgcgattctagattgtataacccaatcgaaaatggcacttgataattacaggaagcatcttgcgacgatagattttaaacattagatattgtgtgcgttctaatataaatttagttgcaacgtaaacaattgaagtttttgatgtgattcagttgcttgatgaaaaattgttgatacaagtttgtaaaactggcatagaggctattttgaaattgataaaggcgtgacaaataaaagcaaagttcagatttgagctttgcttttttcatagtatagaaatgaaatgctgttattaagggggaattaatttggaacttaacgagatgattaattttgtaaaagaaaacaataagataattgttactttatcgctaacaattttcacgtctgtaatatttcctgagttaaaaagttggtattcaaaaatcattaatactgaaaacaaatatagaatattcgatagggcaattattatgattggcacagtgttaccaatgtattttcttttaggatttttgaattataaaatatatattaaactgctagaaagacctcatagtgaatttattaatacaatatggttttcattaataggcataagttatggattaatcttatttatagctatttcaacttaccgaaattatttagcgattgttaatagatttcaattatataaaatgtgtggaaattgtgattacatacatccctataggtttgttgtaaataaagaaagtacattaattaaagattgttttaaagttggcaataatgacctttacgaacctggatcaaactacaaaataattaacctaaatcaaaccatatatggacactatgaaaaagttgaaagtttttatcaaaataaaaacgacaaaatattccatatcattacgctaaatagaaaaaacttaataagaagttggctttttataaataattggtctattattttatgtcgttttacaatgccgatagtgttcactttatttattttttctttatcctattttgataatggcatttataatgcttttattccaattgtgatatacattttcacttttgtttttcaatcaatcatattcaataaaatatatacagagaacaaacaattgaggacacaatatattcaaaagttgaactctggcatagaagtagaaaaatataaagaatagtgtgtgttggtgtttttagtatacgacttacctcaaagacaaacattaaaagataagacaataaaattagaataaatttacgtttgaagataaaaaacaaacatttttcattaaagtttatgatatatttagagcaatagaaagtgtatggaaggggatatgaatggcataccaaagtgaatacgcattagaaaatgaaatgatgaatcaacttgaacaattgggttacgaaagagtaacaatacgtgataataagcaattgcttgataattttagaacgattttaaatgagcgtcatgcggacaaattagaaggcaatcccttaacagataaagaatttcaacgtctgctaacgatgattgatgggaaaagtattttcgagagtgcccgtattttacgtgataaattaccacttagacgtgatgatgagtctgagatttatttgtcgtttttagatacgaaaagttggtgtaaaaataagtttcaagtgacgaatcaagtatctgtcgaggatacatataaagcacgttatgatgtaacgatattaatcaatggactaccccttgtccaagttgaattgaaacgtcgaggcattgatattaatgaggcgtttaaccaagtaaaacgttaccgtaaacaaaattacacaggcttattccgctacatacaaatgtttatcattagtaatggtgttgaaacgcgatacttttctaataatgatagcgaactattgaagagtcacatgttttattggagtgataaacagaataaccgaatcaatacattgcaatcgtttgctgagtcatttatgagaccttgtcaattagctaagatgatatcgcgctatatgattattaatgaaacagatagaatactgatggcaatgcgcccgtatcaagtgtatgcggtagaagcactaattcaacaagcgactgagacagggaataatggatatatttggcatacaactggaagtggtaagacgttgacttcttttaaagcgagtcagattttatcacagcaagatgacattaagaaagttatctttttggttgaccgtaaagacttagatagtcaaacagaagaggaatttaataaatttgctaagggtgctgtagacaaaacttttaatacctcgcaactggtacgccaactaaatgataaaagtttgccacttattgtaacgacgattcaaaaaatggctaaagcgattcaaggtaatgcccatttattagaacagtataaaacgaataaagttgtatttattattgatgagtgtcatcgcagtcaatttggtgacatgcatcgtctagttaaacaacatttcaaaaatgcccaatactttggtttcactggtacgccacgtttcccagaaaatagtagtcaagatggtagaacaactgcagatattttcggtagatgcttacatacgtatttaattagagatgccattcatgatggtaatgtactcggtttctcagttgactatattaatacttttaaaaataaagctttaaaagcagaagataacagcatggttgaagcaattgatacggaagaagtatggttagcggataaacgtgtggaattagtaacacgacatatcatcaataatcatgataaatatacacgtaatcgtcaatattcaagtatatttacagttcaaagtattcacgcgcttattaaatattatgagacatttaagcgacttaacaaaaagttggaacaaccattaacggtagctggtatatttacttttaaacctaatgaagatgatcgtgatggtgaagtgccatatcattcacgtgaaaaattagagataatgattagtgattataataaaaagttcgagacgaatttttcaacagacacgactaatgagtattttaatcatatttcaaaaaacgttaaaaagggcgttaaagatagtaaaattgatatcttaatcgttgttaatatgttcttaactggttttgatagtaaagtactgaacactttatatgttgataagaatttaatgtatcatgatttaattcaagcgtattcacgtacaaatagggttgaaaaagaatcaaagccatttggtaaaattgtaaactatcgtgacttgaaaaaagagacagacgatgcactgagagtattctcacaaacaaatgatacggatacaattttaatgcgtagttatgaagagtataaaaaagaatttatggacgcttatcgtgagcttaaaatgattgtgccgacaccacacatggttgatgacattcaagatgaagaagagctaaagcgctttgttgaagcttatcgtttattagctaaaataatattacgtttaaaagcatttgatgagtttgagtttacaattgatgaaattggaatggatgaacaagagaatgaagactataaaagtaaatatttagccgtgtacgatcaagtaaaaagagcgacggctgagaaaaataaagtatccattttaaatgatattgatttcgaaatagaaatgatgcgtaatgatacgattaatgtgaattatattatgaatatattgagacaaattgatcttgaagacaaagcggaacaacgtcgtaaccaagaacaaattagacgtattttagatcatgcagatgatccgacattgaggttaaaacgagatctaattagagaattcatcgataatgttgtaccttctttaaataaggatgatgatatcgatcaagaatatgttaatttcgaaagtattaagaaagaagcggagttcaaaggatttgctggagagagatctatcgatgaacaagccctaaaaacaatttcaaatgactaccagtatagtggtgttgtaaacccacatcaccttaaaaaaatgattggtgatttgccattgaaagaaaaacgtaaagcaagaaaagccattgaatctttcgtggcagaaacaactgaaaaatacggtgtgtaatgattcagccccctcgctagattagtgtagggggcattattattttctatcttttgtaagttaccatgtgtttggcaatcatcatttggtttcaatacaattttatcatcgtaagtgtatagaaataatgtctataggcatttaaaatagtttataatattaacaggataagtattaaatgtatgttgaaggaggtgcgtagctatggataatagaaatatgattaatcgtgtttttagtcaaaagatattacatcaaattgcaatcaaaaataaaagtgatgttgttgatgaggcatatgatttttatatacagggacctaaaaatatcaatgtaatacagaagatgaaatctttatataattatcttaaaaaatcttatcgtaacgaatatttttacaaaaacacaatgcttaataaactccttctaggacgacattctgttaatacaactactgcactttctgagatgcccatagggaaaagcattgctgattttatattgttaaacggcaaaggcgttgtctatgagattaaaacagaattagataagctggatagattagataatcaaattaatgattattatgaagtgtttaattatgtagtagttattacaaatgacaaacatctgaataaagttatggctagatacaaagatacaacagttggaattttagtattaacaactagaaatacactgagtgaagttcaaaaacctaaagaaaacaatagtctcttaaacacaaaagcgatgtacaactttttacgaaaagaagaaagaaaaagagttattgcacaaaatcatatggatgtgccaacttataatgatttcacagagtatgatgtgttatttgacgtgtttaaagaaataccaatgacgaaactgtataacaatatgatttctgagttgaaaaaaagaggcaacatgaaagaatacaaagatgaatttttagcagcgccggctgaaattaagttcttgttatatttcgcaaaaatgacaaagaaagataaaaataaactatatcattttcttaaggatgcaaataatctcccgcacttcacatagtggcgggggatttattatggcgttaaaatgcccagagtatgggtgtgacccttaaatcatggcaaagcatctaacacttgatatggtgccgagccctaacatagcacaatatagttagtatgacaaagtcatctaacataacacatcagaagttgcccgatttattccagaccatacagtgatatagttgcacaacgcatgacttttatttagcaataactgctacttctgaaataagttgctttgcatagtctgattgcggatgtttgataatatcttctgtgttattcagttcaacgatttcgccatttttcataactgcaactcgatcacatatttcattgataacacccatgtcatgtgtgatgaataaataagtgatgccgaagtctaactgtaattgttttaataactcgatgatatctttttgaattgaaacgtctaaagctgacactgcttcgtcgcaaacaatcactttaggttcaacagcaagtgctctagcgatacttacacgctggcgttgtccaccagataattcgtgtggatagcgatataagaaactttgatctaggccaactttttctaacaacgatacgacagttttaataatgtcatcattatctttgactttcccatgaatgataagtggtcgtttaatcacatcaatgactttaaatcttggattaatagatgcgaatggatcttggaaaatcatttgtatctcttgtcgtaaagatttcaatttatcatctttaaacaaacttaatggtaattcgttataccaaataaaaccttctgacacttcctttagaccgacgaccgtcttagctaatgtcgatttccctgaccctgattcaccgacaatgcctaatgtttcgccttttctaatagccaagttaatatcactaactgctcggtataggctgccactcggtgaagtgtaatccacgctcacgcgatcgaattttaataaaatatcattgtttaacggtcttggcggacgcgtttgatgaatatcaggaatcgcatctattaagcgtttcgtataggtatgttgtggcgatttaaaaatactttcaaccgtgccactttcaacgacacatccatctttcattacaatcacatcgtcgcaaaattgatacacagcgcctaaatcgtgagtgataaaaataatagacgtttctgtgtactcataaagggacttcattaactgcagtaactgattttgtgtactggcatctaatgccgttgttggttcatctgcgattaaaatttgtggctttaaaatcaatgccattgctatcatgacacgttgacgcataccaccagaaagttcatgtggataagcatcaaattgtcgagttgcatgttttatacctactttttctaaaatgtctattgtcatcgattttgcttcagatttagatacacgtttatgttgaaatagtacttctgtaatttgtttgccaatcgttaatcttggattcaacgaagagagtggatcttgaaaaatcattgaaatatccttacctcgaatttgttgtaacgctgaagttgataaattagttaacgattgcccattaaaaataatttctcctgttaacgtgtgatccggataatctggtagtagccctaaaatagatttagcggtaatactttttcctgatcctgattcaccaacaatacctaggatatgtttttttcgtaattcgaaagagacgttttttaccgcttgaactgtagtttcatcataattgaattgtacattcagactgttgacttctaataaatttgacatgatgttgtgcctccctattcacaaatgtgtaaatttattctatacttttgtatatcatagtaatctactcaagattattttacaaggagtgattatcataattacttatttagaatcttttaagtcgttgtatcacaaggcattttacaagtttgtattatcggtattaagcttgccaatatttttatatgcagtgataaagtttttcttttctgctaagagaaaaaatttttacgctaataattctgaaatttcagaaattgaacaggcgttacatcaaaaatataaatatttatcgcagcaaaagtcatccacacaaatacataaagaagcattaaaaatattcaaggcacaaagttctaatacgaattcaaagaatattgaacaagcacatttttcaacatactttgaaaatgtattatttcataagttcatcatgatcaaagtgatattggccttgccgatgttcatcttattgactatttatttacagccattagttagatatatttttgagcgaattgtcatggctgtgattgtcatcattggtgttattgtcagtgtgtttaccattctgtatttttcaccgcttgatgcggcttatagcatactgggacaaaatgcaacaaaggcacagatacatcaattcaatgtattacatcatcttaacgaaccttattttattcaattgtgggataccatcaagggtgtttttacctttgacttaggtacgacttacaaagggaatgaggttgtgactaaagcagttggcgaaagaattccaattacaataattgtcgcagtattagcgctaattgtggcattaattattgcaataccaattggaattatcagtgcgatgaagcgaaatagttggcttgatatcacgttaatgataattgcattaattggtttatctattccaagtttctggcaagggttattattcattttagcgttctcattgaaattggatattttgccaccatcttatatgccagaacatccaatatcgttgattttacctgtacttgtcattggaacaagtattgctgcttctatcacgcgtatgacaaggtcttctgtacttgaagtaatgcgcagcgattatgttttaactgcttatgcaaaaggattatcgacgacacaagtagttattaaacatattttgaaaaatgccattattccaattgtaacgctagttggtcttctagtggcagagttactaggcggttcagcagtgacggaacaagtatttaacattaatggtatcggtcgttatatcgtccaaaaacaactaatacctgatattccagcagtcatgggtggggtcgtatatatatcaattgtaatatctttagcaaacttaattattgatatattttacgctttaatcgatccaaaattacgtagtgaaattaacgaaaggaagtgaggcatatggtaaaacttacaacaaagatagcttccttaaaactattcgcaagttatgctattgcaacttatattttagttatattaacgagtgcattaaatctttttaaaggttatgtggccgatacgttctatattgctgaaacattgctaatcgttttaaccatcattttaattatcattttaacaacggaacaaacatggaagcatcatgacctatggcgacgtatcgtcgaagtgttgttattgttgatgacattaacaggcaacgtatttacattattaatgtttgtaagtattagacgttaccaacgtacatcgcaaatacatagttataacgggtgggaatcgtttatacgaaaaactactagacatcgtattgcgattatcgggttacttattttagtctacatgctgacattatcaattgtgtcacaatttacatttgatacgacattggctactaaaaatcagttcaatgcactgttacatggaccgagtctagcctatccgtttggtactgatgatttcggtagagacttatttacacgcgtagttgtcggaacgaaactgacattttcaatttcaattatttcagtagttattgcagttatttttggtgtgttactaggcactatcgcaggttattttaatcatattgataatttaataatgcgaattttagatgtagtgtttgcaattccatcattattgttagcggtggcaattattgcatcatttggagcaagtattccaaatttaattattgctttaagtatcggtaatataccatcatttgcacggacaatgcgtgccagtgttttagaaattaaacgcatggaatatgtagatgcagcacgtatcactggtgaaaacacttggaatatcatatggcgttatattttaccgaatgcgattgcgcctatgattgtacgtttttcattaaatataggtgtggttgtattaacaacaagtagtttaagtttcctaggacttggtgttgcacctgatgtagctgaatggggcaacattttacgtaccggtagtaactacttggaaacgcacagtaatttagctattgtacctggtatttgtattatgttcgtcgttttagcatttaattttataggtgatgcagtgcgtgatgcactagatccaagaattcattaaaaaggtagggatagatgtgaaaagaatcattagtatcgcaattatagttttagcgttggtattaagtggttgtggtgtccctacgaaatcagaagtggctcaaaagtcatcgaaagttgaagtgaaaggcgagcgaccaacgatacatttcctaggacaagcaagttatgaaaatgatatgaatatcgtcaaagatcaattggaaaatgcaggatttaacgtgaagatgaatatccaaccagattatggtagctatcgtacacaacgtcaagccggcaattatgatatccaaatcgatgactggatgacagtattcggtgacccgaactatgctatgacggcattatttagttctacaggatcaaatagtttattgaaagataaacatgtagaccagttgttaaataaagcttctactcaaaatgaagcagatgttaaacaaacatataagcaaattgaagatgaagttgtatttgataaagggtatatggcgcctttatatggatcaaaaaagaatttagtatatgacaataaagtgttagataaaaatagtgttggattgccaaattcacgtgcattaatatggcaacaatttgattacaacaatagtagagaacgagatacgcggccacttgtgatgacacaacaagatggtgaaattcctacattggatccaatacgttcaattgcgccgtcagtatattcaattaatatgaatatgtacacaaggttattattattagatgaaaatgaccacttaacaacgaaaggttcgttaagtcgtgattatgctgtgaataaggacaataaagcgttttatttcttgttaagagatgatgattattttgcgaaagtggtcaatggacaagcacgtaatactggagagcgtgtatcggctgaagatgttaagttttctttagatagagcacgtgataaaaagtctgtgcctaacaataatacttacaatatgcacaagcatataaatgacatcaagatattaaaagatgaggacatcgatcagttgcgtaaagagaaagacaaggacgataattctatctatgataagttgattaaagcttataacgtcaaatcgttaacgacagatggtcataaagttaataataaagacggtatttatcaaattgttaaaattacgacagatcaatcgatgcctcgagaggtaaattacttaacacactcttcggcaggcattttatctaaaaaatttgttaatcaagtaaatcaagaatatccaaaaggatatggggatagcagtacaattcctgcaaattcagatggaaaaaatgcgctttatgcaagtggcgcatacattatgacacagaaaaatgcatatcaagcaacgtttcaacgtaatccaggattcaacgaaacagaaaaaggtagttatggaccagctaaaattaaaaatattacattgaagtttaatggtgatccgaataatgcattgtcagaacttagaaatcattcaattgatatgttggcagatgtgaatcaaaaacattttgatttaattaagtcggataaaaatttaagcattattcgcaaaaatggacgcaagtcagtctttttaatgctaaatattaaaaaaggtatatttaagacgcatccaaacttgagacaagcagtagttaatgcgatagatcaggatcaatttattaagttttatcgtggcgataaatttaaaattgcttcaccgattacaccacttgtcgatactggtaacgagcaacgtcaagatttagaaaaagtagaaaaagccattaatcaataatgttttaaatatttaacagaaagtaggaggatatagtatggtcattaacttaaatgacaaacagacacaaacatctaaagaagggttaatttccgtatcacatcctcttgccgctaaaattggtaaggatgtattagatcaaggtggcaacgccatggatgcagtgattgcaattcaactggcattgaatgtggtagaaccatttgcatcaggtattggtggcggcgggtacttgctatattatgagcaaagtactggcagtataactgcgtttgatgcgcgtgagacagcccctgcacatgtagacaaacaattttatctagatgattcaggcgaatataaatcattttttgatatgactacacatggtaaaactgtcgctgtgccagcaattccaaaactgtttgattatattcacaagcgttatgctaaattgtcattggaagatttaattaatcctgcaattgaactagccattgaaggtcattcagccaattgggctactgaaaaatattcgcgccagcaacacgcacgattgacaaagtatcacgaaacggcgcaagtatttacgcatgaaaatcaatattggcgtgaaggtgattggattgtacaacccgaattaggcaagacatttcaaatattaagagaacaagggtttaatgcattttataaaggtgacattgcgaaacaattagtcaatgttgtcaaagcatgtggtgggacaatcgctttagaggatttagccaattatgacattcagattaaagcgccaatcagtgcgacatttaaagactatgacatttattcaatgggtccatctagttccggtggtatcacggtaattcaaatattgaagttattagaacacatcgatttaccatcaatgggttcaagatctgtcgattacttgcatcatttgatacaggcaatgcatttagcatatagtgatcgcgcgcaatacttggcggatgataattttcatgaggtgcctgtacagtcattaattgatgacgattatttaaaagcacgtagtaagctcattgatagcaataaagcaaatattgatatagagcatggtgttgtgtctgattgcattagtcatacagatgttgaagaaaatcataccgaaacaactcatttttgtgtgattgataaggaaggtaatattgcttcatttacgacatcaatcggtatgatttacggatcgggtatcacgattccaggctacggcgtgttattgaataccacaatggatggttttgatgttgtggcgggtgggatcaatgaaattgcaccttataaacgaccactaagtaacatggctccaacgattgtgatgcatcacgggaagccaatattaacagtaggtgcacctggtgctataagtatcattgccagtgttgcgcaaacattaatcaatgtattagtgtttggcatggatattcagcaggctatagatgaacctagaatttatagtagccatcctaatcgcattgaatgggagcctcaattttcacaatctacaatattagcattgattgcacgtggacatgcaatggaacataaaccagatgcctatattggagatgtacatggactacaagttgacccaacaacgtatgaagcttcgggtggcagtgatgatactagagaaggcaccgtaatgggtggcgaggtgatagagattagaaaacagccattaccatatcggcaaatgtatgataattatatatatcgtgtatatcttaatggcatacagttgccattatatgctgaacaagtgcgatggatgcatggcaaatattgggttgatgaaagtattgtcagaatcattttccctgaagttagtgcacatattgaagatttgagaagttatgatatcgccggagaaaattatatagatgtggcctggttagcacgaaagaaaggttatcaagtggcattgaaggatgacggtttatacttaactgatgatacatatacttcagtgaagcgaaatacacatgcgtactatagatatgatcgagatagtatcacaagatagtttatgcgtttgatatggagtttgtagtggatatgggcttttgttgaatgaaaggattcgatttcgaactttagcgtgacgcttgagtgtagtaatgttggaaatgctatacgaaacgctattcacctttgtaaaatatacaacgcctcacaaattcgtttttgatgtacatcacaatagttagtctaaaatctaacgtgatgtggtttggtacagttgaacgagttatgtgaggtgtttttataatataggattttaatagatgatttggatgtttctataattacagcataagtattaatgttcacttattttattataagtaaggctttctttgtatataatttggtcttttccaggacttgaaaaataaaaataaagtttctgatcttgatgattactgccttttaaatcactcattccctttaattccacctttgttgatgcatttttgggaatattatatctacgttttaattgtttgacacttggattatcgttcgacaacttaccagataaattataataatcagtggtaggatcatgtgtgactttcaaatcattgctatttaaaatgcttgttaaatcaccattttgaatcaaaaattgattgttttcgattttttgtttcagcgcgggatcttttacgtcttttgtgaaaatgattttattattaactacttttactggataacttttgtatgtcgagtcagtagcattttttctatcgtttgtagttgtgtcatattcaccagttattttatgtgtgttcttatctacctttaacaacatacggtcttcttttaaaagctcatctgatccaacaactgaataagaggattctatataccatgtgtcttgatcattattttcataatggggattatcgtgaccatcaatttcataaagcgtttctaagtttttaataggatatgtacttagtacttttttaaggccatctttcaaatgaatctgttcccacttcattgccaaaaacataccgccactgactacaattgaaataataataattgctactaagtttaaccagaaaattttatacgctttcatacattcccaccatttcttaaaatacttcattaacaccataataatatattttaaaaatatttacatcagtaataaagtgaatatcaaattttaaatttatgaaaataatagatatttataaaaaacgggaaaggtatacaataaaaaacactgtatgacgtttgatcagtcacacagtgtagataacaattaaaatgttgttgccaatttttcagcattattaatactagttgctttaatttcttcagttttatgcggttcggcattgtgtccttcaataatgattgtttcatatgatggcacacctaagaatgtcataattgttcttaaataacggtcgcccatttcgaaattagcagcggggccttcagtataatatccaccacgtgattgaatgtgtaatacttttttgtcagttagtaaaccttgtggtccttcagcagaatatttaaaagttttacctgcaattgaaatagcatcaatatatgctttaactacaggtgggaaagaaaggttccacataggcgttacaaatacatatttatctgcacttaaaaattcttctaaaatgtcactcaatcttgaaactttcatttgttcatcatcagttaacgtttcgccattactcatttttccccaaccagttaatacatctttgtcaataactggaatataattttcaaataaatcaatatgtttcacttcatcttcaggatgttgttgttgatatgtttcgataaatgctttaccagccgccatagaatttgataccagttcattaaaagggtgtgctgtaatatataatacttttgccatttgaaaattctcctctgtttctgttattttctaaagtataattattatactcaatataaaatttaatatcaatcaaaatattcaaattaccatcattttcttcatctatatttggcagtactactaaagtatgagggcatttaattatgaaatagttgatttagaatatatacttaatacccaaaatatatgaaggatggatgccactatgacaaagcgaccaaaacgtattttggcaacaattatcatttttctttcactattatttacaattatttatatagatgacattcaaaaatggtttaaccaatataccgataaattgacacaaaatcataaaggacaaggacactcaaaatgggaagacttttttagagggagtcggattactgagacttttggtaaatatcagcattcaccatttgatggtaagcattatggcattgattttgcattgccaaaaggtacaccaattaaagcgccgacgaatggtaaagtaacacgtatctttaataatgaattaggcggcaaggtattacagattgccgaggacaatggagaatatcaccagtggtatctacacttagacaaatataatgtcaaagtaggtgatcgagtcaaagcaggtgatattattgcatattcaggcaatacaggtaaacaaacgacaggcgcacatttacattttcaaagaatgaagggtggcgtaggtaatgcatatgcagaagatccaaaaccgtttatcgatcagttacctgatggggaatgtagcctatatgatttgtagttatagaagagtgcccgcagtctaaaaaattaagcaatcattgtgtgagtatgatacttacataatggttgcttttttcaatgaaaatcgaaatgctaagtcatacttgtttgatttagatattacttaaaatgtaagacaaggttgttagcattggcagtgaaatttcgcacgtaaaaaatcattattgtcacactaaaaatagttgcgtgctatatcaattttctgtataaaagtttaattctgacagtaatgtaaacgtttacaatttatgattgacattaataatgagtgactatatgatttatgtaagtatttgtgcaaacgttttcacaaagtgtattgcacaatcaaactgtaaacaaagtatgggaggcataacatggcagaactaaagttagagcatattaaaaagacgtatgataacaataatactgtagtgaaagattttaatctacatattactgacaaagaattcattgtatttgttggaccatcgggatgtggtaaatcaacaacattacgaatggttgctggactagagtctatcacatctggagatttttatattgatggggaacgcatgaacgatgttgaaccaaagaatagagatattgcgatggtatttcaaaactatgcattatatccacatatgactgtttttgaaaatatggcatttggactaaagctacgtaaagtaaataaaaaagagattgaacaaaaagttaatgaagcagctgaaatattaggattaactgagtatcttggtcgtaaaccaaaagcgttatctggtggacagcgtcaacgtgttgctttgggcagagctattgttagggatgcgaaagtctttttaatggatgaaccattatcgaatcttgatgcgaagcttcgagtacaaatgcgcacagaaatattgaaattacataagcgacttaatactacgacaatttatgttacacatgatcaaactgaagcattgacgatggctagtcgaattgttgttttgaaagatggcgatattatgcaagtcggcacacctagagaaatatatgatgcccctaattgcatatttgtggcgcaatttatcggctcaccagcaatgaatatgttgaatgctacagttgaaatggacggattgaaggtaggaacacaccattttaaattacataataaaaaatttgaaaagttaaaagctgctggctacttagacaaggaaattattttaggtattcgagctgaagacattcatgaagaaccaatatttattcaaacttctccagagacgcaatttgaatctgaagtagttgtatccgaactgttaggttcagaaattatggtgcatagcacattccaaggaatggaattgatttctaaattagattcaagaacacaagtgatggcgaacgacaagattacactagcatttgatatgaataagtgtcacttttttgatgaaaaaacaggaaatcgtatcgtctaagggggagtattcatgtctaaaattttaaaatgtatcacgttagccgtggtaatgttattaatcgtaactgcatgtggccctaatcgttcgaaagaagatattgataaagcattgaataaagataattccaaagacaagcctaaccaacttacgatgtgggtggatggcgacaagcaaatggcgttttataaaaagattacggatcaatatactaaaaaaactggcataaaagtaaagcttgtaaatattggtcaaaatgatcaactagaaaatatttcgctagacgctcctgctggaaaaggtccagatatctttttcttagcacatgataatactggaagtgcctatctacaaggcttagctgctgaaatcaaattatcaaaagatgagttgaaaggtttcaataagcaagcacttaaagcgatgaattatgacaataagcaactagcattgccagctatcgttgaaacaaccgcacttttttataataaaaaattagtgaaaaatgcaccgcaaacgttagaagaagttgaagctaatgctgccaagctaactgatagtaaaaagaaacaatacggtatgttatttgatgctaaaaatttctattttaattatccgtttttattcggcaatgatgattatattttcaagaaaaatggcagtgaatatgatattcatcagctaggactaaattcaaaacatgtcgtcaagaatgctgaacgattacaaaaatggtacgacaaagggtatcttcctaaggcagcaacacatgatgtcatgattggtctttttaaagaaggaaaagtaggacaatttgtcactggaccatggaacattaatgaatatcaagaaacgtttggtaaagatttaggagtaacaacattgcctacagatggtggcaaacctatgaaaccatttctcggtgtacgtggttggtatttatctgaatatagtaaacataagtattgggctaaagatttaatgctgtatatcactagtaaagatacattacaaaaatatacagatgaaatgagcgaaattactggacgtgttgacgtgaaatcatctaatccaaatttaaaagtgtttgaaaagcaagcacgtcatgctgaaccgatgcctaatattcctgaaatgcgacaagtttgggaaccgatgggcaatgcaagcatatttatctcaaatggtaagaatcctaaacaagcgttagatgaggcgacgaatgatataacgcaaaatattaagattcttcatccgtcacaaaatgataagaaaggagattagttatgacgaaacgtaaccctaaattagcggcattattatctgttatacctggtttgggacagttttataataaaagacccattaaagggacgatattttttatctttttcatcagttttatttctgtattttatagctttttaaatattggtttttggggattgttcacattagggacagtacctaagttagacgattctcgtgtcttacttgcacaaggtattatttctatcttactcgttgcttttgcaatcatgctatatatcattaatattttagatgcatatcgtaatgctgaacgatttaatcgcaatgaggaaataaaggatccgaaggcacgtatggttgcaacatgggacaagacgttcccatacttactaatctcaccaggtacattcttattgatatttgtagttgtatttccattaatatttatgtttggagtagcatttacaaactacaatttatacaacgcgcctccgagacacacattagaatgggttggtttagataactttaaaacgttattcacaattggcgtttggcgtaaaacatttttcagtgttattacttggacattagtatggacgcttgttgcaacgacacttcaaattgcattagggctgtttttggcaattattgtaaatcaccctgtcgtcaaaggtaagaaatttatccgtacggtgttaatcctaccttgggctgtaccatcatttgtgacaattttaatatttgtagcgttatttaatgatgaatttggtgcgataaataatgatatattgcaacctttattaggtgttgcaccagcatggttaagtgatccatttttggcaaaagtggcattaatcggcattcaagtatggcttggtttcccatttgtctttgcactgttcactggtgtactgcaaagtatttcatcagattggtacgaagcagcagatatggatggtgcgtctagttggcaaaagtttagaaacatcacattcccgcatgtcatttacgccacagcgccattgttaattatgcaatatgcaggtaatttcaataattttaatcttatttatctatttaataaaggtggtccaccagtgtcagggcagaatgctggtagtacagatatcttgatatcttgggtgtataatctgacatttgagtttaacaactttaacatgggcgcagttgtgtcattaattattggatttattgttgctattgtcgcatttattcaattcagacgtacaagtacgtttaaagatgagggaggtttataagatgacaaagaagaaaaacatattaaaagtaatcggtatttacagttttatagcgatgatgtttgtcatcattttatatccactactgtggacatttggcatttcccttaatccaggtacgaacttgtatggtgccaaaatgataccagacaatgcaacatttaaaaattatgcattcttactattcgatgacagtagtcaatacctgacttggtataaaaatacgcttatcgtagcatctgcaaatgcactgtttagtgtgatatttgtcacgttaacagcatatgctttttctagatatcgctttgttggtcgtaaatacgggctgattacatttttgattttacaaatgttccctgtattaatggcaatggtcgcaatctatattttgctaaatacaattggattattagattctttatttggactaacacttgtatatattggtgggtcaataccgatgaatgcctttttagtgaaaggttacttcgatacgattccaaaagaacttgatgaatctgccaaaattgatggtgctggccatatgcgtattttcttgcaaattatgcttccattagctaagccgattttagcagttgttgctttgttcaattttatgggaccatttatggactttatattacctaaaatactattaagaagtcctgaaaaattcacattagcagttggattgttcaactttattaatgataagtatgcaaataatttcacagtgtttgcagcaggggcaattatgattgcagtacctatagcaatcgtattcttgttcttgcaacgctatttagtatcaggtttaacaacaggtgcgacaaaaggttagtttgaaattaggagtggggcagaaatgataaagaaccactagtggttgattatgtagtgttcttacacattagccacagctaatatgtacctaaaaatagcctagaacgttgattgatgtttaaggctcgacatacgtactaatgacgataaagatttaaaggaggacgttatgatgacgattaaagttggaatcattgggtgtggtggtattgcgaatggcaaacacatgccaagtttacaaaaagttgaaaatgttgaaatgaccgcattttgtgacgtagacatttcgaaagcagcgtgtgcggcaaaagcatacggtactgacaatgcaaaggtttatgatgattacaaagcattgttaaaagatgccacgattgatgttatccatgtttgtacgccaaatgactcgcattgtgaaattactgtagcagggttgcatgccggtaaacatgtgatgtgtgaaaaaccaatggctaaaacgacagcagaagctcaaaaaatgatagatacagctaaatcaacaggtaaaaaattaacaataggttatcaaaatcgcttcagaccagatagtcaatttttatataaatcagcgcaacgtggcgacttaggtgacatttatttcggaaaggcacatgctattcgtcgtcgagcagtaccaacatggggtgtctttctagacgaagaagctcaaggtggaggaccattaatcgatatcggtacacacgctttagatttaacgttatggatgatggataattatgaaccagaatcagtgatgggttcaacattccataaattaaataaacagcatgatgcggcaaacgcttggggttcatggaatccagatgaatttacagttgaagattctgcgtttggctttattaaaatgaagaatggagcgacgatcattttagaatccacttgggcgattaattctttagaagtggatgaggcaaaatgttcattatcaggaacgaaagcaggtgctgatatgaaagatggtctacgtattcatggtgaagatatgggcacactttataccaaacatgttgaattggaaaacaaaggcgtcgacttttatgaaggtaatgaagtggatgaagctgaagaagaagcaaaagcttggattgatgcagttgtaaatgatactgaaccagttgtgaaaccggaacaagcaatggtagttacaaaaattcttgaagcgatttatcagtctgcaaaatcaggcaaagcaatttactttgaataacatcatacggtaaggaggcacatcatgacaaaattaaaagttggtgtgataggtgttggtggtattgcacaagaccgtcatattccagcattgctgaaactcaaagacacagtctcattagttgcagtacaagatattaatacagtgcagatgattgatgttgcgaagcgctttaatatacctcatgcagttgagacacctagcgagctgtttaaacttgttgatgcggtggtcatttgtacacctaataaattccatgctgatctttctatagaagcattgaatcatggcgtccatgtattgtgtgaaaagccaatggcgatgacgacggaagagtgtgaccgcatgattgaagcggctaataaaaattgtaaattactaactgtcgcatatcattatcgtcacacagatgtggcaattactgctaaaaaagcaattgaatcaggtgtggttggtaaacctttagtagcacgtgtacaagcgatgcgtaggcgtaaagtgcctggctggggcgtttttaccaataaagcgttgcaaggtggcggtagtttaatcgattatggttgccacttgttagacttatctttgtggctactaggtaaagatatggtgccgcatgaagtgctaggaaaaacatataatcaattgagcaaacaaccgaatcaaattaatgattggggaacatttgatcacactaaatttgatgtcgatgatcatgttactagttatatgacatttgccaatcgagcaagcatgcagtttgaatgttcgtggtctgcaaatataaaggaagataaggtacacgttagtttatcaggcgaagatggcggtatcaatttatttccatttgaaatatatgagccccgctttggaactatttttgaaagcaaagctaatgttgagcataacgaagacattgctggggagagacaggcgtgtaactttgtcaatgcgtgtttagggatagaagagattgtggtgaaaccggaagaagcacgcaatgtaaatgcccttatagaagcgatttatcgtagcgatcttgataacaagagcatacaactttaatgattattatatataatacaaaattctcaatataaaaagaaggagtgcttttcaatgaaaataggtgtattttcagtattattttacgataaaaattttgaagatatgttagattatgtcgcagaatctggattggatatgattgaagttggaacaggtggtaacccaggagataaattttgtaagttagatgagttgttagaaaatgaagacaagcgacaagcatttatgaagtcaatcacagacagaggcttacaaataagtggtttcagttgtcataacaatccaatttctccagatccgacagaagcgaaagaagccgatgaaacgttacgtaaaacaatccgtttagcaaatctattagacgtgccagttgttaatacattttctggcattgcaggatcagatgataccgctaaaaagcctaattggcctgttacaccttggccaacagcctactctgaaatttatgattatcagtggaatgaaaagttgataccatattggcaagatttagctgagtttgcaaaagagcaagatgtaaaaattgccatagagttgcatgcaggatttttagttcatacaccatatacgatgttgaagttgcgtgaggctacaaatgaatatatcggtgctaacttagatcctagtcatttatggtggcaaggtattgacccaattgctgcgattcgcatattaggccaagcaaatgcaattcatcacttccatgctaaagatacgtatattaatcaagaaaatgtaaatatgtatggtctaactgatatgcaaccatatggtaacgttgcaacaagagcatggacattccgtacagttggttatggacatagtccatatgtatgggcagatatcataagtcaactaattattaatggatatgattatgtattaagtattgaacatgaagatcctattatgtcagtagaagaaggtttccaaaaagcttgtcaaactttgaaatctgttaatatttacgacaagccagcagacatgtggtgggcataatacgaacgcgaggttagtctgaagtttgtctgaagtaagactggcggaggtgttgaataaatacatatgtcgccaagccattgccaaaaatttcacaccttaaatcaagtcattgtttgtaaagaaggtgtactttatataagtatatagcgatggtcatacccattcacagtaacaatccgaaccattgaaaagagcatataaccttttcaatagtgaggtatatgataataaaaaaagcctgttgtcacaatggtcatagacacgacatactttaaaggtttctgaatataatatttcagaacgcactttaaagatggacgtcgatggcgactaatgtgatgacaggctttcatctttttaaatattcattaatttctcttcttgtttaatacgtacatataagaaatacgcatacggtactaataaaatagttgtatatgttgcatgtgttaataataatacaccgattaattcaggaatgatgtttaagaagtaatttgggtgttttgtaattttatataatccagatttaataataggatggttaggtaaaatgaataattttaatgtccaaataccacctaaagttttaataaccataaataacataatataagcaaagattaatataactaagccaataccatttgcaaagctaaatgtatctttattaataaatgcctctacaccagccaatacataaattaaaacgtgtgttattgctaaaaacttcgaatttttaacgccatattcaactgcaccgtctgcttttaattgttttgagtgattaatagatatctttaagctgacaagtctgatacagaaaaagataagtaatatagatagaatcatgatgtcctccgtcattatgtcatatgtataagcgttgattttgacaacataaagtattttatagataaaacttgtcaaatactattaactatttattaattttagtacataaatatgtttctaagtatgtgtttatgttcagtattttggataatttaataattttaaggatattaagcgcttacaccgacgtgatatatttggcttaacgaaaatgattgaggtgacagagatgaacttttttgatatccataagattccgaacaaaggcattccattatcggtgcaacgtaaattatggcttagaaacttcatgcaagctttcttcgtagtgttctttgtttatatggctatgtatttaattcgaaacaactttaaggcggcacaaccgtttttaaaagaggaaattggattatctacattagaacttggttatatcggattagcatttagtatcacgtacggcttagggaaaacgttacttggttattttgtcgatggacgtaacacaaaacgtattatctcgttcttacttatcttatctgcgattacagttttaattatgggatttgtgttaagttactttggttctgtaatgggattattaattgtactttggggacttaacggggtgttccaatcagttggtggacctgcaagttattcaacgatttcaagatgggcgccaagaacgaaacgtggccgatacttaggattctggaatacatcacataatatcggtggtgccattgcaggtggtgtcgcactttggggtgctaatgtattcttccatggaaatgttataggaatgttcattttcccatcggtgattgcattacttattggtatcgcaacattatttatcggaaaagatgatccagaagaattaggatggaatcgtgctgaagaaatttgggaagagccggtcgataaagaaaatattgattctcaaggtatgacgaaatgggagatctttaaaaaatatatcctgggaaatcctgttatatggattctatgtgtttcaaacgtctttgtatacattgtacgaatcggtattgataactgggcaccgttatatgtgtcagagcatttacactttagtaaaggcgatgcagttaatacgatattctactttgaaattggtgctttagttgcaagtttattatggggctacgtatcagacttattaaaaggtcgtcgtgcaattgtagctattggctgtatgtttatgattacatttgttgtcttattctacacaaatgctacaagtgtaatgatggttaacatttcattgtttgcattaggtgcgttaatctttggtccgcaattattaattggtgtatcattgactggttttgttcctaaaaatgccatcagtgtagcaaacggaatgacaggttcattcgcgtatctattcggtgactcaatggcaaaagttggtttggcggctattgctgatccaacacgtaacggtttaaacatctttggatatacattaagtggatggacagatgttttcatcgtcttctatgttgcattattcctaggtatgattctattaggaatcgttgctttctatgaagaaaagaaaattagaagtttaaaaatctaatatcaatcggattaaaagtatcgccaatttattgcagtatagttggcaatcctgccccgacggcatgtgcgtgaagagatgaaagatactgcttctacccttgcaaatatatcatctctatgtctcggggcagatcataattccctgttatgaagtatccttatttgcccgacttagggtgactcaatgaatttactccttacaataaagacatatagcggtgtcaatattgtagggagtattgttttatatttaaactctctaaaaagcggactgaaagaaaagtgaaaacttctctaccagtccgctttttcatagaacaaaatggaggcgccataatcattagttatttgctaatctattttgcttgcttacaataatcacttggcgacatttgtaaatattttttaaaatgatagctaaacattttatactctgaaaagcctactttgtctgcaatttcatagtgcttatagtgtcgatctaacaattgcagagattgtaaaatacgatagcgatttaaataatcgacaattgtaataccaacatgatctttaaatgttcgcatcgcatacgattcactaacatcgatatgttgaattaaatctgaaacagtcactttcgtttgataagattgcttaatttgatcaacaatctgatttacataataatcatcgtattctacttttaataatggttggaaggcatcatgacaagatgctaagctacggccgttctgtgattgttgctctaataaggtacggacaagtcttcctaaaataacttctaattgtgcatggtctactggttttaataaataatcaagaacatgatgttgaatgccggctttcatatattcaaagtcatcgtaactcgataatatgatgacattacaatctagatgtgcaatatcattgagtaaatcgacgccatttttacgtggcatacgaatatcagtaattactaattctggctgatgttgttgaattagtgataatgcttcaacaccatctttagcagtgtatattgtattgaaatgatagtctccccaaggaatgatttgctttaaaccttctcgaataattcgctcatcatcacaaataactaccttaaacatctacattcccccttgaaagtggtattttataacaaattaacgtaccttgattacgctttgaaaaaatatggagtcgtgcatgtgaaccatattgaatcattgctttattgtgtaaatgatttaatcccaaatgcttagtatcaaatacatcattattaagagattggcgtacatattgcaggcgagatgacgacatcccaataccattgtcgcaaactaaaacatgtaaattctgacgtgccaatgtcaggcgtatagtaatgtccaatgactcagtatctctaccatgtttaatagcattttctatgagtggttgaagcatcattttaccaattgtctggtgacgcgattcttcagaactttcgatatggagtttaatcatgtcatcaaaacggatgttttgtatcgcaacatactgttcaatgtagttcaactcttcgtttaattccactgtatgtgagtttgtacgtaatgagtaacgtaacatttgcgataattgttggaccacagtttgtgctaatttcggagataacgtaattaaatattgtattgtttgcatcgtattgaataggaaatgaggttggaattggcgctctatttcctttaactgaatatcacgcaagcgacgttctgtatgctcgatagaatggatcagttgctcatttgattcaaacaaatcgtaaatataattattaatttcttctagttcactgttgttttttaaaggcgtatatgtacctagatgacgatttttggcatagtaaattttttgaataatcgtttcgatatcttttgtttgtcgtttagccatattatctgcgctaatgaaaccaaatattactagtaaaacaagaactacagccataacaattaacaacgtgataccatcttcaatgttttcatgtatatctttataaataatgagacgatggtcagcatggtttaattttacagattcattcataaatccgaattgttgaggtctatacttttcacctatagtaaaacggtcatcgttggcgtataaaatattgtcatattgatcaacgataagtgcgaattgtcggctatctttcttaatttcacttaaacgtggggtgttagccatataaattttaagcatatatgtactatttttgaacttaagctgatgcgttgaaaataaatacatatttttagtgtttaaatgttcataattattggttataaactgatttggtccagataactcataataaagtgttgcgggctgttggtgtattaattttaataattcacgttttgtagcggtaacatcatgatgatttgttaaatagagctcttgaaacgaattattatgctgtgtaataaatgtctgaatctgcttttcagtatgatgtaaagatgactgactttcatcaacatgttgatgaatcgtacgatgctcaatccaaatataaatggcatagaagcttactagtccaataataatgactaaaaatactgggaaaatagtagacgcaaataacgatcgtctcaattgatgtctataaggtttgtatgccgtcattgaatcatctccaaaaatttatgatgcggaatgtccggtaatttagatttcggtattaaaggtatgttcttaagattttcaatagactgatcgctttgttcactaacatcctttcgaattgacttggcatcgaactctgcaactaatcgttgttgtactgagcggcttgttaaatattgtactaactttttacgcttaggatgagggtgtgcatttttaactaaagcaataccatcaacatttaacattgttccttcaattggataaacgattgatacaggataacctttgtttttccatgtgcgtgcatcttgttcgtagcttagacctgcgtaatattcacctttagcaacatcttcaattactttagacgtctttgacagttgcatcgcgtggtcttggaattgatgcacatcacttactcgatgatgcatgctataaatagcacgcatatgttgatagcctgtcgttgttgtatttggatttgagtatgcaattttacctttaagtataggttgtaataaatcttgataacctcgaatcttaatatctccttgtaaatctgaattaactactataactgttggcattaatagaaaactagtaacatatttattgttcgagcgataatcctctaattgctgtgttacagatgtatcttgatagggaacaaaatcttctggatgatcaattgtttctgataacacaccacccataaagacatcaccacgctccgaaaaatcttcgttatgcaagtttgaaagcagtacttgagtagatccgtgtttaatttcaattttgacatgctcttgtttttcaaattcatttaaaattggacgaatcaagtttgattgatacggagaataaactgttaatacatttttatctgattcagagtgacgcgtattagcgcatgctgataaaaaaatgagaaataatagcaagatataaatttttgatttcatgatatcccatcaattctatgtatattttaatacaataattttagcaataaatgacgcataagtaatgttaaatatttagaaatgtttatagatgacttgttaagacgttgcaaatgttgtgatagcacataatttttgtttgtcaagacgacttaccgaggctgtaaaatcaaactgttatattttatttgaagctgttatataaaaatcggcaagatattgaacggttcaaaagtaaatttttacgtcaataaaagtatttaatcctgtctcttcatatataatagtaaatctttctaagtattgatttaacgcttattaacaatcattttttataaacaaatatatccacctaaattaacttttaaagcaatgaaaatagtgaacattataactgttgtgtaacaaaatgcaattagcatattactgttacacaaattagtacagtttctatgttttgacatatatttgatgaaaattgtacataatttatgtgaaaaaaatcacaacaaacatgctacaatgactatgaaaacgttaacatagcatttcaaattcacaacattatacagatggaggcgtttagtatgttagaaacaaataaaaatcatgcaacagcttggcaaggatttaaaaatggaagatggaacagacacgtagatgtaagagagtttatccaattaaactacactctttatgaaggtaatgattcatttttagcaggaccaacagaagcaacttctaaactttgggaacaagtaatgcagttatcgaaagaagaacgtgaacgtggcggcatgtgggatatggacacgaaagtagcttcaacaatcacatctcatgatgctggttatttagacaaagatttagaaacaattgtaggtgtacaaactgaaaagccattcaaacgttcaatgcaaccattcggtggtattcgtatggcgaaagcagcttgtgaagcttacggttacgaattagacgaagaaactgaaaaaatctttacagattatcgtaaaacacataaccaaggtgtattcgatgcatattctagagaaatgttgaactgccgtaaagcaggtgtaatcactggtttacctgatgcatacggacgtggacgtattatcggtgactatcgtcgtgtagctttatatggtgtagatttcttaatggaagaaaaaatgcacgacttcaacacgatgtctacagaaatgtcagaagatgtaattcgtttacgtgaagaattatcagaacaatatcgtgcattaaaagaattaaaagaacttggacaaaaatatggtttcgatttaagccgtccagcagaaaacttcaaagaagcagttcaatggttatacttagcataccttgctgcaattaaagaacaaaacggtgcagcaatgagtttaggtcgtacatcaacattcttagatatctatgctgaacgtgaccttaaagcaggtgttattactgaaagtgaagttcaagaaattattgaccacttcatcatgaaattacgtattgttaaatttgctcgtacacctgattacaatgaattattctctggagacccaacttgggtaactgaatctatcggtggtgtaggtattgacggacgtccacttgttacgaaaaactcattccgtttcttacactcattagataacttaggtccagcaccagaaccaaacttaacagtattatggtcagtacgtttacctgacaacttcaaaacatactgtgcaaaaatgagtattaaaacaagttctatccaatatgaaaatgatgacattatgcgtgaaagctatggcgatgactatggtatcgcatgttgtgtatcagcgatgacaattggtaaacaaatgcaattcttcggtgcacgtgcgaacttagctaaaacattactttacgctatcaatggtggtaaagatgaaaaatctggtgcacaagttggtccaaacttcgaaggtattaacagcgaagtattagaatatgacgaagtattcaagaaatttgatcaaatgatggattggctagcaggtgtttacattaactcattaaatgttattcactacatgcacgataaatacagctatgaacgtattgaaatggcattacatgatacagaaattgtacgtacaatggcaacaggtatcgctggtttatcagtagcagctgactcattatctgcaattaaatatgcacaagttaaaccaattcgtaacgaagaaggtcttgtagtagactttgaaatcgaaggcgacttccctaaatacggtaacaatgacgaccgtgtagatgatatcgcagttgatttagtagaacgctttatgactaaattacgtagtcataaaacatatcgtgattcagaacatacaatgagtgtattaacaattacttcaaacgttgtatacggtaagaaaactggtaacacaccagacggacgtaaagctggcgaaccatttgcaccaggtgcaaacccaatgcatggccgtgaccaaaaaggtgcattatcttcattaagttctgtagctaagatcccttacgattgctgtaaagatggtatttcaaatacattcagtatcgtaccaaaatcattaggtaaagaaccagaagatcaaaaccgtaacttaactagtatgttagatggttacgcaatgcaatgtggtcaccacttaaatattaacgtatttaaccgtgaaacattaatagatgcaatggaacatccagaagaatatccacagttaacaatccgtgtatctggttacgctgttaacttcattaaattaacacgtgaacaacaattagatgtaatttctcgtacattccatgaaagtatgtaacaaaatttaaggtgggagcactatgcttaagggacacttacattctgtcgaaagtttaggtactgtcgatggaccgggattaagatatatattatttacacaaggatgcttacttagatgcttgtattgccacaatccagatacttggaaaattagtgagccgtcaagagaagtcacagttgatgaaatggtgaatgaaatattaccatacaaaccatactttgatgcatcgggtggcggtgtaacagtcagtggtggcgaaccattgttacaaatgccattcttagaaaaattatttgcagaattaaaagaaaatggtgtgcacacttgcttagacacatcggctggatgtgctaatgatacaaaagcatttcaaaggcattttgaagaattacaaaaacatacagacttgatattattagatataaaacatattgataatgacaaacatattagattgacaggaaagcctaatacacacatccttaacttcgcgcgcaaactgtcagatatgaaacaacctgtatggattcgacatgtccttgtgcctggttattctgatgataaagacgatttaattaaactaggggaatttattaattctcttgataacgtcgaaaagtttgaaattctgccatatcatcagttaggtgttcataagtggaaaacattgggcattgcatatgaattagaagatgtcgaagcgcccgatgatgaagctgttaaagcagcctaccgttatgttaacttcaaagggaaaattcccgttgaattataaatacaattcagaccgaaaagaaagcatatgtaacttcaagagtgaaggggcatatgcttctttttcaattgagtatagagtattagcaagacgtagtaggtatatgagacaacttctacaatggttgaaggaagacgtttttgtaagtagctatgaagtagctatgctgataaagaatgtgatgccttgttaaaggtggggttccaatatcatcatttagctgatgttgaatgggttattatttgctacttgcatatgaatatgagtcttttcaaatttttattgaccctgagtaatgaaaaatattaagatgaaacttaatattaaagcaatgcggagcgtgattatgaagagaattagtaaagatatatgggcagtatttaaattactgtatcaaaataaagggcgttttagcattaatgccttactattgcagttaatcatgatttttattagtagtacatacttaattttactatttaatatgatgttaaaagtagctgggcaaagccaacttacgattaacaattggacggaaatcgttagtcatcctgccagtgtgatacttcttattatattcatattaagtgttgcctttctgatttatgtagagttttcattgttagtttatatggtttatgccggctttgatcgacagattattccatttaaatccattttttaaaaatgcctttgtaaatgtgcgtaaactcataggtgtaccagttattttctttgtcatttatttaatgttaatgatacccattgccaacctaggactaagttcagtattaacaaaaaatatttacatacctaaatttttaacggaagaacttatgaaaacgacgaaaggtataatcatttacggtacctttatgattgctgtatttatattaaactttaaattaatatttactttaccgttaacgattttaaaccgtcagtcgttatttaaaaatatgagactaagttggcaaattacgaagcgaaataagtttcgacttgttatagaaatagttatattagaactcatcattggtgcgattttaacattaattatttcaggagcaacatatcttgctatttgtgtagatgaagaaggagataagtttttagtctcatcaattttatttgttgtattgaaaagctcattgttcttctattatttatttacgaaattatcattaatcagtgtgttagtactgcacttaaaacaagagaatgtattagaccaaccgggcttagaatttaaatacccaaaaccgaaacggaagtctaggttctttataatttcaatggtgcttgcagtgacatgttttatcggttataacatgtacttactttacaataatactatcaatacaaatatctccattattggccatcgtggtttcgaagataaaggcgttgaaaattctattccgtcattgaaagctgctgcaaaagcgaatgtcgaatacgttgagttagatacaattatgacgaaagataaacaatttgttgttagtcatgataacaatttgaaacgtttaacaggtgttaataaaaatatttctgaatctaatttcaaagatgtcgtcggtttgaaaatgcgtcaaaatggacatgaagcaaaacttgtatccttagacgaatttattgaaacggctaaacaatcaaatgtgaagctactagtagagttaaagccacatggtaaagaaccagcagattatacacaacgtgttattgatattttgaaaaagcatggtgttgaacatcaatatcgtgtgatgtcattggattatgatgtgatgactaagttaaaaaagaagcaccatatctcaagtgtggttatatcattccgttacagtttggccattttaaagaaacatctttagatttctttgtcattgaagatttttcttattcgccaagacttgttaatcaagcacacttggaaaataaagaagtctatacttggaccattaacggcgaagaagatttaacgaaatatttacaaaccaatgttgatggtattatcacagatgacccagcattagctgatcagattaaagaagaaaagaaagacgaaacatatttcgatcgttctataagaatattatttgaataatataaacaaagacctctaaagttatcaagatgatactttcagaggtctttttaacgttgtcatctatgggataggcaatcgtttcattcgtttataatcatatgacaagtatttataaggcaatttggcgtcataaacacttacatgatttattggtgaattattaattgttttgtgaatgcaaagggttagaaatggaatcgcaaatactttctaatctatgtttcgctttagtcatttgatccaaatttttagtgcgtatagcagattttgcaatatagtgtgcagctaaaatatcgcgcttttgatacgcatctaaatttaggtacgataatttatttaagtcagtgtttactattaattcatgtaattgatctacaagcgcttgatgttgatacgtatgtgatgtagtttcagatttgcttgctaatttaataccagtcgtatcaaggagcgccgctttaataccagcaactaaatatgttttgattttcatttgtgttgtcatgctttgttactcctttgatgtacattaatcaaaaaaattatacactattgtatattgcaaagctaattaactataacaaaaagatagttaatgctttgtttattctagttaatatatagttaatgtcttttaatattttgtttctttaatgtagattgggcaattacattttggaggaattaaaaaattatgaaaaagcaaataatttcgctaggcgcattagcagttgcatctagcttatatacatgggataacaaagcagatgcgatagtaacaaaggattatagtgggaaatcacaagttaatgctgggagtaaaaatgggaaacaaattgcagatggatattattggggaataattgaaaatctagagaaccagttttacaatatttttcatttattggatcagcataaatatgcagaaaaagaatataaagatgcagtagataaattaaaaactagagttttagaggaagaccaatacctgctagaaagaaaaaaagaaaaatacgaaatttataaagaactatataaaaaatacaaaaaagagaatcctaatactcaagttaaaatgaaagcatttgataaatacgatcttggcgatttaactatggaagaatataatgacttatcaaaattattaacaaaagcattggataactttaagttagaagtaaagaaaattgaatcagagaatccagatttaagaccatattctgaaagagaagaaagaacagcatatggtaaaatagattcacttgttgatcaagcatatagtgtatattttgcctacgttacagatgctcaacataaaacagaagcattaaatcttagggcaaaaattgatttgattttaggtgatgaaaaagatccaattagagtgacgaatcaacgtactgaaaaagaaatgattaaagatttagaatctattattgatgatttcttcattgaaacaaagttgaatagacctcaacacattactaggtatgatggaactaaacatgattaccataaacataaagatggatttgatgctctagttaaagaaacaagagaagcggtttctaaggctgacgaatcttggaaaactaaaactgtcaaaaaatacggggaaactgtaacaaaatctcctgttgtaaaagaagagaagaaagttgaagaacctcaagcacctaaagtttctgaaaaagtagatgttcaggaaacagttggtacaactgaagaagcaccattaccaattgcgcaaccactagttaaattaccacaaattgggactcaaggtgaaattgtaaaaggtcccgactatccaacgatggaaaataaaacgttacaaggtgaaatcgttcaaggtcctgatttcccaacaatggaacaaaacagaccatctttaagcgataattatactcaaccatcgttaacgaaccctattttagaaggtcttgaaggtagctcatctaaacttgaaataaaaccacaaggtactgaatcaacgttgaaaggtattcaaggagaatcaagtgatattgaagttaaacctcaagcaactgaaacaacagaagcttctcaatatggtccgagaccgcaatttaacaaaacacctaagtatgtgaaatatagagatgctggtacaggtatccgtgaatacaacgatggaacatttggatatgaagcgagaccaagattcaataagccatcagaaacaaatgcatacaacgtaacaacacatgcaaatggtcaagtatcatacggagctcgcccgacacaaaacaagccaagcgaaacaaacgcatataacgtaacaacacatgcaaacggccaagtatcatatggcgctcgcccgacacaaaacaagccaagtgaaacaaacgcatacaacgtaacgacaaatcaagatggcacagtatcatatggcgctcgtccgacatacaacaagccaagtaaaacaatgcatacaacgtaacaacacatgcaaacggccaagtatcatatggcgctcgcccgacacaaaacaagccaagcaaaacaaacgcatataacgtaacaacacatgcaaatggccaagtatcatacggagctcgcccgacacaaaacaagccaagcaaaacaaacgagtataacgtaacaacacatgcaaatggccaagtatcatacggagctcgtccgacatacaagaagccaagtgaaacgaatgcatacaatgtaacaacacatgcagatggtactgcgacatatggtcctagagtaacaaaataagtttataactctatccatagacatacagtcaatacaaaacattatgtatctttacaacagtaatcatgcattcgatgatgcttctaactgaattaaagcatcgaacaatcggaagcatatttctaaattatttattcattatagtcttaaacataacatgacctaatatattactaacctattaaaataaaccacgcacatctatgtgatatacgacaatcacagcaataataattgctttagaaattcgtaccgaactggaacttacaagtctagttcgaacacactgatgtgagtggttttctttattttaaacatgaacaatcagataagttactagcattagcaaatattattaaatcaaagggcttcgattcataaaatttaaaacaatgattagaattagacgtgtaaatgttaaattctaaaacggaaatacccgctatcctattaaactactattttgttcgatcactatatttcacacagcttcaataataaaacgaaactgcttcaatctgcttcaacttcagcctacttcattcaataacaaaacgaatccgcttcatccaaaatcaaccattctaatgcacatattcaaatatagcagctgcacccataccgacaccaatacacatcgtaaccatgccgtaacggctatcgggacgtctacccatttcattaagtaaacgcgcggttaacattgcccctgtagcacctaatggatgacctaaagcaatagcgccaccattcacattcgtacgtgatatatctagacctacttctttaatagaagcaatcgtttgagaagcaaatgcttcgttcaattcgatcaaatcaatatcttcaacagatagattgctgagtgacaatacttcaggaatcgcatatgcaggcccaatacccataattttcgggtcaacgcctactgccttataaccaacgaatcgtgcaataggtgtcacgccgagttctttcactttatctccagacattaaaactacaaatcctgcaccatcagaaagtggggcagatgttcccgcagtcacagtgccgtcagctttaaatactgtacgtaatttggctaatgcctctatcgtggtgtcaggtcgtataaattcatcttggtcaaagatatttgtgtgtacttttggtcctgcgtttgtatattcaactgagtttacttgtattggaataatttcatctttgaaccgaccatcaagttgtgcgtcataggcacgttgatgacttctgacagcataagcatcttgatcttcgcgtgatacgtcaaattgggatgctacattttcagcagttaaacccataggatatgacgcacctatatcatcatattgtaaggtaggattgtttgtgggctcgttgccacccattggtacggcactcatcaattcaacgccaccagctacaagtatatctccttgaccagccataatttgattggctgcaatcgcgatggtttgtaatcctgatgagcagtagcgattcactgtttgacccggtaccgtgtcagataatcccgtacgcaatgcaatcgttcgtgcaatgttttgtccttgtaatccttctggaaaagccgtaccaacaatgacatcttcaatcatattcttattgaattttccgtcaatacgtttcaatacgccttgtaatactttggctgcgacatcatcaggtctttcgtggaataatgcgccttgctttgctttcgctgcggctgaacgcccataagctacaatgtatgcttcttgcatggttatcatcctctcttattgactatcttttaattacgtaatggcttaccagtttttaacatatgcgcaattctttcatatgattttttagattttagtaagtcaataaagccaattttctccaacgattgaatgtaacgttgattgataaatgtatttcttggtaaatcaccacccgctaaaattgtggcgatatttaaggcgatatgataatcatggtcgctaataaaatgaccccgtctttgcgcatctaattgtccttgaatcaatgctttgaagtcttcgcctaaagcgatatattgatgtctaggattcggaatatagtttgtttctgcttcatatttcgcacgtatgagcgcaacttcgacacgttgtgctgtattgaaaataatcgtatctgtatcacgtaaataaccataacggcgtgcctcaaaggcatttgtagagactttcgcaaatgcgatattcgtcagtacttttgtcatggaagcttgtttgtcatcaaacttatgcgatgtgcgtaatatgcgatcagccatttctgcaaggccaccgccactcggtaataagccaacgcctgcttcaacaagaccgatatatgtttcacttgcagcgacaacaataggtgagtaaagtacaagctcacagccaccgcctaaggcacgaccttgaacagctgtgactactggtttcaaactatacttcaaacgattaaagctataatgtaatttatcaattgattgtgcaacgacatcatctacaagaccgtcttcatgcgcctttttcattaagaaaaggttagcacccacactgaaattattaccatctgcataaataaccatacttgtgtaatgttcattttccagtaaatcaatcgcatcaactaacgcatcgttgaattcatcggtaatgacattatttttactttgtaatttcagtagcagttgatcatcatgagttacggaaagtttggcatcacctttatcccaaagttcatcttttacgaagtgagaaacaggtgttgcatattcgatggtctcatcttgtttataaaagccaccgtctaaatcactaatccattgtggtaagtctccaagttcgtcttccatacgtgttttaacacgttcatatcccattgcatcccataattggaatggaccaagtttccagttgaacccccagacaagcgcacggtctatgtctcggaaatcatcggtagctttaggtacattgatggcagagtaatagaaattattacgtaatgtctcccataaaaatagtcccgcttcgtcttgcgtattgaatatgacatcaaggttatgcactaagtctttattaaattcatttaaaattggtaattgtggttgcgatacaggtacataatcttgtttttcaacatcgtaaacaagtcgagctttagtttctttatcctttttgtaaaatccttgtttcgttttacgtccgagtgcgccattttcaaacaacgtatttacaattttgacatcatgaaaataaggtgtttcttcaggtacttgttgcatgcctttaattacagacactgcaatgtctaaaccgactaggtcggatagggcatatgtacctgttttaggacgaccaatcgcttgcccagttaaagcatccacatctacaatgcttaacttgtgttgctcggcgcgatacataatatcattcattgtttgcgtgccgactctatttgcgacaaatccaggcacatcattgacgacaatgacacctttacctaacacattttgcgcgaaattttttacatctaatataatagattccttcgtgtgtgacgtaggtattaactccactaatttcataatacgtggtgggttaaagaaatgtagaccaaagaatcgttcttgatccttctcattaaatgcttgagcaatcgcattaattggaatacctgatgtatttgtagcgaataaagcatcttctttagcatgttgtagaacttgttgccaaacagcatgcttaatttcaatatcttctttgactgcttcgatatataaatcagcatcatcatttaccaagtcatcatcaaaattaccatatgttaaatgactcgctagatttaagtcgaatagtagcggccgtttcttatctgtaattttatcgtaagattttttcgcaatgagatttggatcgtttttgtccactacaatatctaatagttttactttaagtccagcattcacaaagagtgctgccagttgagcgcccattgtgcctgcgccaagaacggttactttattaattgtcatagtgattcctccaatttagttgaggataagataaccattaagataattggaataacgttgctattttataaaattaattaagtatctttgacagtcatcttagcctcttatttaaggaaaaagctttatgcttaaaataagtcttttttagtgaaattactgcatctcatataattctttgctatttatacgaaagcagaatctccagtcaaagcgcgtccaattactaaggcattaatttcatgtgtaccttcgtacgtgtaaatcgcttctgcatcagagaagaaacgtgcaatatcataatcgtcagctagtatgccattaccacctgtaataccgcggcccatagctactgtctcacgcaaacgtaaggcattcatcatcttcgccgttgaagttgcaacctcgtcatattcaccatgtgcttgcatattagctaattgagcacatgttgccattgcttgagctaaattaccttgcatcattgctagcttttcttgtattaactgatatttactaattggtttgccgaattgcttacgctcagtgacataatctaatgtggcacgtaaagcgccagccataccacctgtagccatataggcaacacctgctctcgttgaataaagaattttagcaatgtctttaaagcttgttatattttgtaagcgatccgcttcatctactttgacattagttaatttaattagtgcgttaggaacaatgcgaagtgcgattttattatcaatgacttcaatatcgacgccatcttgttctggtctgactacaaagcaatggggtttgccagtttctttatttactgcgaatactggaatgacatcagatacatgtgcaccaccaatccatttcttttcaccattgataacccaagtatcgccctggcgttcagcgactgtttcaagacctcccgcaacgtccgaaccgtgttctggttcagttaaagcaaagcatgtacgcagttcatgtgactgtaatttaggtgcatatttcgcaatttgttctttgctacctccgaaatagaaagtattatgccctaaaccttggtgaacaccgagtagggtagctaaggaaatatcaaatcgcgcgagtaggtaagacatgaaaaactgaaatagttgactaggcattttggcgtttggacgatccttgtaaagtaatggattgttaaaataatttaattctcccagatctttaaaatagtcctcgggtacagtagcgtctatccaatgttgattaatattttcacggtacttactttctagcaatgaatctacttgttgtaaaaattcgacttcaccgtctgttaagcctttagcaatactaagtacatcttcaggaaataatgtttttaagactgtttctttttcaaatgtcatataaattcctcctaaaaataatatgaatactaatgtgaaatacatttaattcaaaaacaacacgcttcacatgtaaacgcttacactaaatatcaaaaatttttatcacctttaaagtgtttgtgagactttgtcattcatcatttgtcgaatcgcaagtttatctggtttctgcgtactgtttaacggcatatgtgtcactggtacatacattcttgggactttataacctgctaaacgacttcgcatatgttgatctaaaatttcagcgtaatgaggttcatcttcgcgaagtataatggctgcagcaattgactcaccatattttggatgatcatagccaacgaccacacaccggtctactagtggatgctcagctaaagcattttcgacttcggatggtaagacattttcgccaccagttatgattaattcttttttgcggtcaataataaatatatcgccatcgtcgtccatttttgctaaatctcctgtcaataagtaacgaccatgaaacgctttagcagtctctgctggtttattccaatatcctggcgtgacatttttagccttaattgcaagttcaccaatctcgccagaaggtacttcttcaccgttatcatcaaggatacgtgcatcaacaaacatgactgctttaccaatactcattggtttacgttttgaattttccggtgtattaacaagtacaagcggtgcttcagttaagccatagccattaataatgtttatgccatattgtttaaaagctgcttggatacttggtaatggttgtgaaccaccttggatgatataatccatagctttaaaattttcaggattaaaattagtagcacgtagcgtactataatacattgtcggaatcatgataataaatgtagggtgatattgtgcaatcatgtcatttaattcttcgccgttaaagtaacgttgaagaataagtgtgccacctgacatcaatactggtaatacagtatcgttaaaccctaaaacatggaacattggtgttgatacaatcgtaatatagtttgaattgaacttatacgtcagctctaagtttgcgccgttatgaacaaatgattcatatgagaacatcacacctttaggtgatccggttgtaccacttgtataaattaatgctgcaagatcttgtggttcaacaggtgttgcttgaaaaggttggtgatagtctggatttacgatttcatcatattgcgctacatcaatatccatatgcaataagttttggtcaatatcgatgagtgaacttaaatgtttttcagcatagaagagcagttttaattgtgcatcttccacaatggctgcaatttcttttgggttaagccgccaattcaatggtaaaaaaaccgcacctgttttaaaacaagcaaatagtaaatctaatattgcaatatcatttggcgcaaaaataccgataacatcgccttttttaacaccttgagatgttaaataatgtgccatattatcagcgcgtgcattgagttgttggtatgtccaagatgtttgttttgcgtgatcaataacggcaggcttgtcatcatcgaagtctgaacgcgtttttatccaatcgaaattcattagtataccccctttagcttcactttcatactttatgaattgattgtttaagttgtccccatttttctttgtaaatgctggtatcaattaattttaaatgatcagcaataattggtttaaaagccatttgattcaaaatatctttatgcaaatcaagacctggtgcaatttcaattagtttcaagccttgattggtgagttcgaatactgcacgatcagtaacaaaatagacttcttgctcgagtgattgtgaatattgtgcattaaagtcgatatggctcacatctgatacaaatttctggttttggccttcactttcaatgtttaatcgttgattatgacatgagacatgactgccagctacaaaagtacctgaaaagataattttatttacagattgcgtaatgtctataaagccgccacatccatttagtcggtcattgaagtaagacacgttgacattgccgtattgatcaacctcagcaaagctaagataggcaactgatacaccattgttataaataaaatcccatgctcgatcatgaggcatgcgcacatctgcattgtaattcataccaaaatgttcacgactcccaacgaatccaccgaaaatgccaacatctagaatcggttgcacatcatgttcaacacattcttcatgcaataaattagagagttcattattgatgccataaccgatgctaattgtatcgccataagttaaaaactgagcagcacgtcggagaatcaatttgcgactattaaaaggtaatgcgggttcaggtattccatcaattcgttcttctccagacaaggctggtaaataatgactctgaattacttggcggtgattcttttcatcttctgtgacgtatacataatcgacaagatttcctgggataacaacttcattcggttttagttgatagtcgtcaactaaatctttaacttgtacaataactttcccatgattggctttcgtgtttaatgcgacatgataacactcgctcaagtacgcttcttgagttaaataaatgttaccttgttgatctgcgtatgttcctctcagtagtgccacatcaacgctagggaatgtgtagtgtaagtatgtttcatcgttgatggttactaatgaaactaaatcatcagttgttcgtgtatttactttaccgccaccgtatctaggatcaacagctgtgtttaatccgattttagtaataactccaggcaataattgattactctgacgataatgagttgcaatgataccttgtggtaaaaaataagcttcaatgtcattatttttcattgcttgtgccgttttggaagaagccgttaaaatgctcataatgacacgtttaatcatacgacgttctataaaatcatctaaatccggtgcggcacctaaactatggatatcattcgctaatataaatgttaaatcattgggcgtatgatatgtgtcatgttgcgctaacacagcacgtagaacttcggcgggtaagttggctacagctaatgctggtaaaccaatcacatcaccatctttaatgatatgttgtaagtcgtgccatgtgatttgtttcaagcaagtcacctccatcacatttgataaaatatagcgtttttacactttgtgtaaacccttacaagaaatataacataacgacgtttaaaatcaattagaaatatctttttattctgataatagacacagtatagacacattttaatggtcgataacaattgtaatatcaagggtttgtaatgaattgaatatcattaaaatacttatataaaaatattgctcggaatataaaaagttaaataggttttgattttcaaatatggaatacaaggtgcccaatcgaacaaagtatttatattaaaatatggaaaatccatcaatattaaattaaaatagttttattatgaaaagtgaaagtaggtaagtctatggaaggtcttaatcatcgaagaaatacagaaaaagaagagacaatacaaacgcaatcagttgcacctaatacaggtgaagaggggatgtcatcagcaattacacaatcaactaagacgtccgacatacataatgaatctatcgataaacaaatggaagccaaagcgcatgaaacagcgcaaaatgcagatttaaaaaacgaagcaagaagtttatttgataatgcaaccaaatccatcggtagactagcgggcaatgatgaaagtttaaatcttaatttaaaagatatgttttctgaagtatttaagccacatactaaaaacgaagcagatgaaatatttatagcgggtactgctaaaactacgccagcaatttgtgacatatcagaagaatgggggaagccatggctcttttctcgagtattcatcgctttcacagtaacatttattggattatgggtcatggcagcgatttttaataacacaaacgcgattccgggtctcatttttataggggctttaacagtaccattatcgggtttgttcttcttttatgaatcaaatgcgtttaaaaatattagcatttttgaagttattatcatgttctttattggcggagtattttcattactaagtacgatggtattatatagatttgtcgtttttagtgatcaattcgaaaggtttggttctttaacatttttcgatgcatttttagtaggattagttgaagaaactggaaaagcgctcattattgtttatttcgtcaataaattgaaaacaaataagattttgaatggattattaatcggtgctgctattggtgcagggttcgcagtttttgaatcagcaggttatattttgaatttcgctttaggggaaaatgtcccattattagatattgtcttcacacgtgcgtggactgcgattggtggtcatttagtttggtcagcgattgttggtgctgcaatagttattgtgaaagaacagcatggctttgaattcaaagatatttttgataaacgctttttaatattctttttatcagccgttggtttacatggcatttgggatacatctttaactatacttggcagtgatacgttgaaaatatttattttaatcgttattgtgtggatacttgtattcattttaatgggggcaggtttaaaacaagtgaatttactgcagaaagaatttaaagaacaacagaaaaaagtagacgaataataattaaagcttatgttgctcatatgtttgtgacataagctatttttataattagtctttaaaagagtggaagtggaatactttttggagttaaaaaagtgtttcacgttaaacaaatagtgacaattaggtttatataaaatgaatatgattcactgaaagtatgtaataatcattttattgaaattcatcaaacagaaattaatacaatcatataagcaaattaaaccacgccataatcatattggatgacttcggcgtggtttttatagttgaagcagggctgagacataaatcaatgtcccacactcccttatcgttcaatcgttgttcgataatcgattaaatagataccttcaggtgttactttataatttttaaccttagagttagcagcgactatttgatcgttgtaagcaatataactgtttggtacatctcgacttgataatttaataatatcattagaaatattgtgacgttccttaacatctacagtgtgattcaattgattaattaaagcatcaacgttgctattattgtagtctcctttattaatagcaccatcttttttatatgcttgattaaagaaatagcctgtatctccacgaggaatcgttccgaaactatacatcgttgcatcccatgcagaacggtctgttaagtaaccttctatgtcatcaacacttttaatgtcgatttcaatatttgcttttttagcatctgattgtaatacttgcgcaattttcgatagttctggacgaccgtcatacgtaattaacttaatttttaaagggtgttcttttgtataaccatctttagctaataacgtttttgcttgttcgatattttgtttggttaacttaggttctttaatatatggaattttatcattaaatggactcgttgcaggtttcgcgtaaccttgataaatatgatctgcaataccttgtctatcaatgatatgatctaatgcttcacgaacggatttagtcatttttttattagtatgattatacataagtaaagaagttctaaatccagattcttttgacacttttaaattttgattattttctatgtcttgaactttattaactgggacatcagttattaagtcatctttttgagattctaaatttctgacgcgattattgccatcttcttggtacgtcacagtaatatgatcaagtttcggtttaccttgccaatagtccttaaaattcgacaatgatatttttcgagattgcttataatcttttatttggtaagggcctgtaccaacaggagtttgattaacatctgatttagcatctgtatcataaattgccataaaaggattagctaattcagatacaagttcagggtaagcggagctggttttaattgtcagtttttgacctttagcggtaattgatgatattggtaatgaatatttgaccaagtcgcttttttttatgctattttcaaggctagatttcactttttctgcagtcaatttttgaccgttttgaaatttaatattatcttttaattcaatatctaacgttgtatcatttggttgatgatacgatttcactaatactttttctatttttccttgatcatttgttttaaataatgattctgcagcaccaatcttaactggtacatctgtttcataaggtgcaatagactttgtttttaacggtaacgaaatatttaagtctttgccagatgaatgcattgagccacatcctgataacactaatactgctgaaaatatagttgctagtcttttaaacttcatttcattaacactctctttctaattactatgtaaaacgcaataattaatattttaaaactttattttgttaaagtaaaatgttgttcaagtttagtaattattaaagttcaattaattgtagtaattatactttttaaaaataaatattagaaatgaagttagcgacatgtatagtgatccacgataaacatatatacctaagtattgagcaactgctgtagtactacagcttggttatgtttagtatcttttgctgcatataacaatagaacatgattatgctgatttacaatatcctttaatttttcaaaagcatctttttgcgcatcctgatcacgtaattctttttcatatttttctttaaaagctccaaaaagtttaggatcatgttggaaccattgtcgcaactcagtagaaggggcaatgtcttttaaccaataatctaggttagcagttcttttcgaaatacctctcggccagactctatcgactaggatacgaatagcgtcggtattatctttattgtcataaatccgtccaatatctacggtcatcttgtgaactcctttcttatgaaattcagtgagcatacatcaatgcatgttggggtgggacgacgaaataaattttgcgaaaatatcatttctgtccaactcccaattaaaaaacagccatgacaaagtaaaatcatagctgtttttgtatggatgtcatttatttttacgtttagttaaatacttcaaaccaactgcaaagaccgtgtaccccgctatggtttgtatcaatgttttaattaaattattatttttaacaataatatttgcagtaacaatacttacgaaatataatgcaaatacttttacgtaacgttgattaagtttcatatgagtactaaacctcttttctcagttatactgcaacgcttagtcttggaataaatgtttcgtagtgtacgcgatccatatcgtaatttaaagatttaagtgcttcgatcatagattgtaagaattttgtaccaccacagatataaatttcaggtttatttgctaaaaatacttgtaattcttcagcgccaatatagccttgtttatcttttaagtgagtatataacttagcgttgtcatgatggcttgcgatactgttgaagttgtctttgaaaggtaaatgttgttcattttcagcaacttgaaccatctgtgtatctaaacctttggcagaggcagcttcatacattgctactaaaggtgtgacgccaatacctgaacctaagaaaagttgtggttcagtcgtattctctaatacgaatccacctacaggcgcagctagattaatcgtatcgccttctttaatctcatcgtgtaaaattgttgaaacttcgccttcatgttctgttgtgacatcacgtttaacgccaaaagttaaatggtttttatcacctgatacgatagaatagtgacgtttagctctatatggaagtttatcactagaaacatcaactgtgatgtattggcctggtgtaaattcactaaagtcatattcttcagtttcaactgtaaatgatttaatgtcttcagattcttgtttaatattggtaattttgaatggtttaaaaccaatccacatcatttgatcataaatttctttttcaatttggatgaacacatccgcaataacgccatatgctttcgcccaagcttgaatgacagggtcattttcttctaatcctgtcacgtcttgaatggcttttaataaattttcccccacaattggataatgttcagcataaacttgtagtgcgcagtgtttatatgcaactggcataatgactggtttaataatacttaaattatcgatgttaacagctgcagccattactgcttgtgctaatgctgaagattgcatgcctcttttttggttcgtttgattaaacatatttaaaagttcaggatgtgccttaaacattttcggataaaaagttgacgtaatttctgttcctttttctttaagcaatggcaccgtttgtttgattatgtctttctcttgttctgtaagcatgatactcctcctttaatctgtctattttgattattctactaaaaatttcgatattcaattaattggtttgagaaaatataaataaaatggcaaatttgataattgtatgacatttttaattttttaaatacttatcaataagcattgtgtacaattgtctgtttgcacaccgacgattgcgcgcatttatttgactaattcaaaaaacattgttgttttcttaggaaaaattaaacatgataataaaaatgtgaaagtgtaaataatcactggcgaagtacgaagattaaagacatctaagatgtaatcgtatacaaattaaaaaggtgtaaaaattaaaataaaatgtgaaataaatcacaatttaatattgacccagtacttaatgcatgttacattttatatgtgaaataaatcacaaacttaaaagcggatgacacatgaccttttaagttatgcgttgaaaataaaagagatgtttatttgcttttgtatcgtcaataagtagcattaaactaacatatttgaaactacatgtatgttagtgaattaatcataagggagtttttgtaatgaacaaatttaaagggaacaaagttgtattaataggtaatggtgcagtaggttcaagctacgcattttcattagtgaaccaaagcattgttgatgaattagtcatcattgatttagacactgaaaaagttcgaggagatgttatggatttaaaacatgccacaccatattctccaacaacagttcgtgtgaaagctggcgaatacagtgattgtcatgatgcggatctagttgtcatctgtgctggtgctgcacaaaaacctggagaaacacgtttagatttagtatctaaaaacttgaaaatattcaaatcaattgttggtgaagtaatggcatcaaaatttgatggtattttcttggtagctacaaatcctgttgatattttagcgtatgcaacatggaaattctctggtttacctaaagaacgtgttataggttctggtacaattttagactctgcacgctttagattattgttaagcgaagcgttcgatgttgcgccacgtagcgtcgatgctcaaattattggtgaacatggtgacactgaattaccagtatggtcacacgctaatattgcaggtcaacctttgaagtcattacttgaacaacgtcctgagggcaaagcgcaaattgaacaaatttttgttcaaacacgtgatgcagcatatgacattattcaagctaaaggtgccacttattatggtgttgcaatgggattagctagaattactgaagcgattttcagaaatgaagatgccgtattgactgtatcagcattattagaaggcgaatatgatgaagaagatgtttatattggtgttccagcagtcatcaatagaaacggtattcgcaacgtcgtagaaatcccattaaacgacgaagaacaaagcaagttcgcacattcagctaaaacattaaaagatattatggctgaagcagaagaacttaaataactttttataaaatctataccattccaaaaattgtaaaaccttaccccaaaaaattgtataaagggctatttgatacaactatatgtgtcgagtagccctatttttaatgtagtgaaagtcgttgttgaaattaaattcaaatctggcacttaagctttaatcatagcattaagatgattgtctagcagaggcgatttgcgggcttactatagtgcatgatgaacttaatgcttcacatgtaacattaaaaataaaagcaacgatgtcacttcttacttcgtacatcgttgccattagttctgttgatatttcggttagtcttaatccccgagcaattcttcaatttcatttttgataactgttacgtgaggcccataaattacttgcacaccagtgccttgctggattacacctttggcaccagtactttcgagtaatactttatcgactttgtcattttgatgaagtgtgacgcgtagtctcgttgcacaacagtcgacgatttcaatgttatcttcgcctcccaaaccagcaacaatagtttgtgctctttcagtagcctcaacttgttgtgctgcaactttatcttcacgaccaggtgttttgaaattaaatttcgtaattaataatctgaaaacgatgtaatacaaacagaaccacacaattccaataggtatgacgtataggtagtttgttttactattaccttgtagcacaccaaaaagtaagaaatcgataaagcctccactgaaggtttgaccaattgtaatgttgaaaatgtctgccatcataaatgctaatccatcaaagaaggcatggattacataaagaataggtgcgacaaacaagaaactaaactctaaaggttcggtaatacctgttaaaaatgaagtgagtgcagcggataacattaaaccgccgacaacttttttatgttcaggtttagctgtgtgataaattgcaagtgcggcaccacataagccgaacatcatcgtaataaaacggcctgacataaagcgtgacacacctgaataatacttcgtcacatctggatcaccaagttgagcaaagaagatgttctgcgtaccttgaactaagtgccctttgacttctaaagtaccaccaagtgccgtctgccaaaacggtaagtaaaaaatatgatgtaaaccgagtggacctaacaatcttaagatgaagccataaacaaaagtaccgatggcacctgttttcgttacaaatccaccaacatgataaatgccggcttgtatgcttggccaaatgaaaaacatcaatacacctaaaaagattgcggcaaatgctgtgacaatagggacaaatctagagccaccaaagaaacctaaatacggtggtaataccactttgtgatatttgttgtgaagtattgcggtcataatacctgtgataatcccgccaaaaacaccggtttcaaccgtttgtataccgagcaccatgccttgtccattttgtgcaagctgatcttttgccaatgtgcccgtgatagttaataaaccattcatagttgcgttcataattaagaaaccgagcagtgcagctaaacctgcagtacctttatcgcttctagataatccgattgcgacaccaattgcaaagatgactggtaaattttggaaaacaatactacctgcagctgacattaatgtaaaaatattttgtaataaggtaatatctaaaatagggtatgctttaacggtgtttggattacttaatgcaccaccgatacccaacaatagacctgcagctggtaagattgcgataggtaacataaaggacttgccgaactgctgtgctttttcaaataaagatttcatcaacatccctcctaattattctcaatatagcttttgagaaatttaatatcaatatatattctgtggatgaaaatatttttcataaaaattgtttgaatcatgtaacaatcatataaattgctgtttatattgttgtgaaaatgagttgacaaaagtcgtataaatctgtagacatcctattttttagcgaggtagggtgacaaagaatatcggataaatttataagccataaaatagataaatagtgtttgtatccaaaactatgagaaagttaaaactatttttcaaaacaaacatgattcaccacataaataaatatacataagctatcgataacaacttaagaaaggtggatatataaatgaaaagaaagattattatggattgtgatccaggacacgatgatgcaatagcattaattttagcgggggcaattgacagtccactagagatattagctgtaaccacagtcgcaggtaatcaatcagttgacaagaatacgacaaacgccttgaacgtattggatattatgggacgccaagatatagcagtagcgaaaggtgcggataggccgttaattaaaccagctgcctttgcttctgaaatacatggggaatctggattagatggtccgaaactaccgtcgacaccatcacgtcaagcagttgcaatgccagcatcagatgtgattattaacaaagtgatgacgagtgatacacctgtaacaattgtagcgacaggtcctcttacgaatgtagcaacggcattgattcgtgagccaagaatcgctgagcatattgaatctattactttgatgggtggtggtacatttggaaattggacgcctacagcagaattcaatatttgggtagatgctgaagcagcgaagcgtgtttttgaaagtgggattactataaatgtgtttggtttagatgtaacacatcaagttttagccgacgatcacgtgattgaacgctttgaaagtatcaataatcctgttgcacagttcgtcgtagaattattgcaattctttaagaaaacatacaagactcactttaatatggacggtggtccaatacatgatgcttgtacaattttgtatttgttacaaccagaattgtttacaatggtacccgttaatatcgacattgaacatcaaagtccactaacttatggcactatggctgtcgatttaaatcatgttacaggtaagcctgccaatgcttattttgctacagcagttgatgttgaagaagtgtggaacttgatagatcataagttacgtacatacgaataataatacttaattaaatagatacagttagccctaaggtgcctgatttaagcgtccttagggtttttgtattggattacaatggtcatgacaatttgataatgattgagctatgtatgttaaaaatgcttcaaaaaacacaaaatacaaaatacaaaaatatatgcaaaaatttcaattgctttattttgaaagattaaaatcacaaaaaatatagatataattgaaatgttgttaaaacatcacaatgatgtacatgctcattttgaaaatatgtgttcaaagtgtgtacatcggtgtgacgattgatgataaattgagctcagatgctcaaaggaggatcgaacatgaacggggataatcagcaaatactcagagaaattgtattgaatcctactattcatggtaaagaacttgaatcgatatttggtttgtctcgtagacaacttggatatcgcattcaaaaaatcaatttgtggcttgaacaagagggttatccaaaacttgaaagaacaagccaaggaaattttattgtaagttctgaaatcatgacgttattcaagcgagatgtatcagagcagcaaatgttaaacggcaacgatgtcatttttagcatagaaacacgtcgttattatttaatgctcatgctttttagtaaggaaaacgcaatgtctctaaaccatttttcaattgatttacaagtcagtaaaaatactgtcattcacgatataaatcatgtgaaagagcaattggaagatcatggtttgtcacttaagtattctcgaaaacatggttatgaaattgttggtgatgaatttgaagttcgccgtttcttcattaagttgattgatcaaaggttgaatcatgatattactaaaagtgaagttttaaaggcgctcaatttaacattcgaagatatcgcatatcaaaaagacaagatcaaacaggtagaacaatttttgaagagtcgctttatagacaaatcacttagttcattgccttatgtcctttgtgtgattcgtagacgaattcaaagtggtcatgtgattaatccattaaatattaattatcagtatttgagggatacgaaagaatatcaagcaacggagattatgacgcaacatgagccggatttgccagaagcggaaaagttatatttgacattacacttactttcaacaagtgtgcaatggactgatttgcaggaatcagataacatatcgaatttaacgatggccatcgctcaaatgattcaccattttgaacaaatcacttttattaacattgaagataaggagaaattatcacagcaactcttgttacatttaacgcctgctttttataggattaaatataacttaacggatcgggatgaattaataaatcctttacaaggaaattatcaatccttatttcatatggtgaaacaatcatgtcaatcgttaactgaatatttcggaaaatcgttgcctgataatgaaatagcatatttaaccatgttgttcggaggtagtttgagacgtcaagatgaaaacttcgatggcaagataaaagctattatcgtgtgtacacaaggcacgtcagtatcacaaatgatgttatacgagttgcgaaacttatttccagaaattattttcttagatgcgatttcacttagaacatttgaaaattacacattagattatgacatcgtcttttcaccaatgtttgtcctaacacataaaaaattatttatcacaaaagtagctttatctgaaaatgagcaacgaaagttacgtaaagaagtgatgaagtacattaataaggaatcggctgacattgataaggaaataaacaagttaatggcattaattgaacgcacaacgacagttaatgacattacagaactacgtgatggtttagaagattttattgcgaattataattcaatttcaactattaatggatcgattgtcacacaaaataagacattagatttagctgacttgataccagcaaggcacgtgaaaagaatacatcatgttgaaaatattgatgaagctattgctaaagcaagtgatgtgttagttgctaatcattttattgatattaaatatattcgtgagatgcaacaggtatttgatgattcgtatatggttatcatgcaaaatattgctattccacatgcatattctgaaaagcatgtacataaaacagcgatgagtatgttgatattacaagaaccaatatacatgtcagatgggacagcaatccatattattgtacctattgctgctgttgataaagtgacacacttaagagcgttactacaattgagagatgtggcgcaagacaatgacgcaattaaacgcatcatacaaagtcgcaaaaattctgacgttaatgagattttaaaaaattattcaaataaagaagcgagggaaaatggatgggacagcaattagtgcataaagaaaatataatgctcaatttgtcggcaactgataaagaatccgtattgtcacaaatgtcagatgtgttatttcaaaatgggttcgtgaagtcaacgtttaaagatgcagtcatcgacagagaaaaagaatttgctactggtttaccaacgcatctatgttcggtcgctataccgcatacagatgtcgaacatattaaccatagaacgataggtgtggctgttctagaaaaagaagtgccgtttattgaaatgggaacacttgatcaacagacagaagtgaaaatcgtttttatgttagcaatggataaagttgatgatcaacttaagctattacaacagttgatgcaaatttttcaaagtgaagaaaaattggagcagattctacgaacgaaagatgaaacaattttagcaacactaatcaatgattatttggaatataactaaaaattaattggaggaattgaaaatgaaacaagtattagtagcgtgtggtgcaggtattgcaacgtcaacagtagtaaataatgcaattgaggaaatggcaaaggaacacaatattaaagtagatattaaacaaatcaaaattacagaagttggaccttatgaagacactgcagatttattagttacaactgcaatgacaaagaaagaatataaattcccagttatcaacgcacgtaatttcttaactggtattggtattgaagaaacaaaacaacgaatcttaacagagttacaaaaataactgaattgatatgtaatgtgggtcaataacatataaatatatgcaaattgcatataaatgactatcacgacaaatgattgttgatgacatagaaacgcagtgactgtaattcaaaggggttgcagtcgaatttagcaagggtagtcgttgaaatgaccgtaacgacaaatgtaatcacaatcggaaagtatcgtgacaatgcatatataacagggagggtttaaatatgagttacttcactgattttgtaaggggatttttagatttaggtgcaactgttattttaccggttgtcatattcttgcttggcctattctttaggcagaaaattggagcggcatttaggtctggtttaacaataggtgtggcttttgtagggattttcttagtcatcgatttattagttaaaaatttagggccagcagcacaagcgatggttaaaaatttaggcgtcagtctgaatgtgattgatgtaggttggccagcaacatcatctatcgcgtgggcatcatctgtcgcagcatttataattccactcggaatcatagttaacgttgtattgctagtaactaaagtgacaaagacgatgaatgtagatatttggaatttttggcattatacgtttacagcagcaatggtttatgccgtatcaggcagtatttggcaagcgttattagcagcagttattttccaagttatctgtttgaaagtagcagattggacagcaccgatgatgagtgagttctttgatttaccaggtgtatcgattgctacaggaagtacaatttcttatgcaccaggtatttacttagttaaattgctacaaagagtacccggtctgaataagttagatgctgatcctgaaacaattcaaaaacgttttggcgcatttggagagtctatctttgtcggcttaattttaggtttaggtattggtgtgttagcaggttacaaacctggagacatcattaatttaggaatgtcaatggctgcagtaatggtattaatgcctagaatggtaaaaatcttaatggaaggtttaatgccagtttcagagtctgcaagaacatggctaaataaacgttttggcgaacgtgaaatttatattggattggatgcggctgtagcattaggtcatccagcggttatttcgacagcattaattttagtacctatcactgttttattagccgttattttaccaggaaaccaagtactaccttttggtgacttagcaactataccatttgttgtcgcgtttattgttggtgcagcaagaggaaacattattcattctgtcattgtgggtacgattatgattgcaatttcactatatattgcaacggacgtagcacctattttcacagatatggcgaaaggtacgaatgtacaaatgccaaaaggttcatctgaaatttcaagtattgatcaaggtggtaatatcgttaactatcttatctttaaactatttagtctattcaattaaaaatcgaggtgtttgtggtgaaagctttagtaaaaacaagagaaggacatggcaacttagaacttcttgataaagaagttgcaacaccgctagatgataaagtaaagattaaagtacattatgcaggaatttgtggcacagatattcatacttatgaaggtcattataaagttaattttccagtgacattaggtcatgaattttctggtgaaatcgttgaagttggagcagacgttaaagattttaaagttggtgaccgtgtcacttctgaaacgacattctatgtttgtaataagtgtgaatactgtgaatcaaaagactataatttatgcaaccatcgaaaaggtattggaacacaagttgatggcgcatttactaattatgtcattgcacgtgaagaaagtttgcatcatattccagatgaagtatcgtatcagtctgcagctatgacagaaccattagcatgtgcacatcatggcgtttctaagattcaagtgaactctggcgatgtagcagttgtaatgggacctgggccaatcggattacttgtagcacaagtgttaaaaagtaaaggcgcaactgttgtggtaactggattggacaatgacaaagtcagattagataaagcagaagcattgcacatggattatgtagtcaatttacaacaaacagacttaaaaacgtatatcaatggaattacagacggttacggtgcagatgttgttgttgaatgttcaggtgcagttccagcagcacgacaaggtttggatattttacgcaaaaaaggtttctacagtcaaataggtatttttaaggatgctgaaattccatttgatatggaaaaagtgattcaaaaagaaataacagttgttggtagtagaagtcaaaagccagcagattgggaaccttcattgcaacttatggcggatggtttagtaaatgctgaagctttggtgacaaaaatatatgatatttcgaaatgggacgaggcgtatcaacatttaaaatctggcgaaggtattaaagcattacttaacccgctcgatttagatgaaaatgaaggagagaattaatatggtagaatcaatgctaacttttatgcttgggccattgagacaaatcactgatttttatatggaacatttactcgtaagtaattctatcgtcattgcaggttattttgcgacaggtgtttttaaaaagaaaaaagttgtgaattaaatcaaatttgaggtgatttacaagtgaaagctttgaaattatatggcgtggaagatttacggtatgaggataatgaaaagccagtcattgaaagtgcgaatgacgttattgttaaagtacgagcgactggcatatgtggttcagacacgtcacgatacaaaaaaatggggccatacattaaaggtatgccatttggtcatgaattttcaggtgttgtagatgccattggaagtgatgttacgcatgttaatgtaggcgacaaagtgacaggttgcccagcaataccttgttatcaatgcgagtattgtttaaaaggtgaatatgcacgatgtgaaaagttgttcgtcattggctcatatgaacctggatcgttcgcggaatatgtcaaattgccagcgcaaaatgttttaaaggtaccagacaatgttgattacattgaagcagcaatggttgagccatcagccgttgttgcgcatgggttttataaatcgaatatacaacctggtatgactgttgcagtaatggggtgtggcagtataggattgttagctattcaatgggcacgaatatttggtgctgcgcatatcatcgctatagatatagatgcgcataaactagatattgcaacatcattgggcgcacatcaaacaattaattcaaaagaagaaaatcttgagaaattcatcgaaaatcattacgccaatcaaatcgatttagctatagaatcatcaggtgctaaagttacgattggtcaaatattgacgctaccgaaaaaaggtggcgaggtggtattactcggaataccatatgatgatattgagattgatcgcgttcattttgaaaaaattctgcgtaacgagttgacagtatgtggctcttggaactgtttgtccagtaattttccggggaaagagtggacggcaaccttacattatatgaagacgaaagatattaatgtaaagcctattatttctcattttttaccgttggaaaaaggcccggagacatttgataaattagttaacaagaaagaacgatttgataaagtcatgtttacgatttattagtatgcacctttgaggacgaaaacgctggtatagttatagctatgaaagtacgaatgccgtctggtctacagatactatcgaaataattcatcttcgaatatacgttgctaaataaccggtttacttgtgtgaaatatgcttgtgaatcggttgttttgcattttgtatacttaaaataagatggcaatatttgataatttttagagtgaaaatcaagtacagccacttaataagataaatttattataatatatggtaaaatgatggcagtaataatgaatttgaaaaagagtaaacattaatacctttaacaatttaatatcgtcagtgttaatgattaactgcatggcaaaacaacttagaaaggtcagttacaaaaatacatttttataaaaaattatcacactattgtgacaactacctttgacttaataaaagaggcaagtgagcaataggttaggcttatgttcgggcataggtcagtaatgtataaatggaaatgatgtaatgacagaatggaggacaacatgatttatgcaggtattttagcaggaggtattggttcgagaatgggaaacgtgccattaccaaaacaatttttagatattgataataaaccgattttaatccatacaattgagaagttcattttagtgagtgaatttaatgagattattattgcaacgccagcacagtggatttcccatacacaggatattttaaaaaaatataacattacagatcaacgtgtcaaagtagttgcaggtggtacggatcgaaacgaaacaatcatgaacattatcgaccatattcgcaatgtaaatggaattaataatgatgatgtgattgtaactcatgatgccgtaagaccatttttaactcaacgtattattaaagagaacattgaagtagcagccaaatatggtgcagtagatacagtcattgaagcaattgatacgattgtaatgtctaaagataaacagaacatacacaatatccctgtaaggaatgaaatgtatcaaggccaaacaccacaatcatttaatattaaattattacaagatagttatcgcgccttaagtagtgaacaaaaagaaatcttatcagatgcatgtaaaatcattgtcgaatctggacatgcagttaaattggtacgtggagaactatacaacattaaagtgacaacaccgtatgatttaaaagtagcaaacgccattattcaaggtgatattgccgatgattaatcaagtatatcaactcgttgcaccgagacagttcgacgtcacatataataatgttgatatttatggtaatcatgtcatcgtaaggcctttatacttgtctatttgtgcagctgatcaaaggtattacacaggtcgaagagatgaaaatgtactgcgcaaaaaattaccaatgtcattagttcatgaagctgttggtgaagttgtatttgatagtaaaggcgtatttgaaaaaggtacgaaagtagtaatggtaccgaatacacctacagagcaacatcatattattgcggagaattacttagcctctagttattttagatctaatggttatgatggttttatgcaagactacgttgtgatggcacatgatcgtatcgttccgctgcctaatgacattgatttgagtacgatttcatacacagagttagtgtcagtaagttatcatgctatacaacgatttgaacgtaaatctatacctttgaaaaccagctttggtatttggggtgatggtaacttaggttatattactgctattttgctacgtaagttgtacccagaagctaaaatttatgtatttggtaagacagactataaattaagtcatttttcatttgtagatgacatctttacagtaaatcaaataccagatgatcttaaaattgatcatgcatttgaatgtgttggaggtaaaggaagtcaagttgcacttcaacaaatagttgaacatatttcaccagaaggcagtattgctttgttaggcgtaagtgaattacccgtggaagtgaatacacgattagtacttgaaaaaggattaacattgattggtagtagtcgaagcggctctaaagattttgagcaagttgttgatttatatcgtaagtacccagacattgttgaaaagttagcattattaaaaggacatgaaattaatgtatgtacgatgcaagatatcgtccaagcgtttgaaatggatttatcgacatcttggggaaaaacagtattgaaatggacgatttaataaaccgatgggggaataacaatgacaaaaacgaaacaagcaatacatattgataacatatactgggaacgtgttcagttatatattgaaggacatagtgaaggtgtcgatttaacatcaggacaatttgttctgaggaatttaaccgaaacaaaaacattagaagcaaatgaaatgaaaatagacggtaatacatttatatgtagattcaacgtcgcaatattagacgatgggtattatttaccaatggataaatatttatttgtttatcatgaccagttagagtatattggacaacttaatccaaatattattgatcaagcttatgcggcattaaatgaagagcaaattgaagaatacaatgagctgactacacaaaatggaaaagtgaactatttattagcgtatgatgctaaagttttccgtaaaggtggcgtatcacaacatacggtctataccattactccagaaatagcaagtgacgttaacgaatttgtatttgatattgaaatcaccttacctcaagagaaatcaggggtcattgcgacaagcgcacactggcttcataaacaaggccataaagcttcatttgaaagtagaagtttcttattcaaagctatttttaatattacaaagttactacatattaaaagaagcaaaacaatattattcacatcagattcacgtccgaatttatcaggtaactttaaatatgtatatgatgagttgctacgccaaaaagtagattttgattacgatattcaaacagtatttaaggcgaatattacggatagacgtaaatggagagacaagtttagattgccatatttacttggtaaggctgattatatttttgtcgatgattttcatccattaatttatacggttcgctttagaccatcacaagaaattattcaagtgtggcatgccgttggtgcttttaaaacagttggctttagtcgtacaggtaaaaaaggtggtccgtttatcgattcattaaaccatcgtagttacacgaaagcatatgtttcatcagaaaccgatattccattttatgctgaagcatttggaattagagaagaaaatgttgtaccaacaggtgtaccacgtactgatgtactatttgatgaagcttatgcaacacaaattaaacaagagatggaagatgaattgccaattataaaaggtaagaaagttattctattcgcaccgacatttagaggtaatggtcacggtacggcacattatccattttttaaaattgattttgaacgtttagcaagatactgcgagaagcataatgcagttgtgttattcaaaatgcatccgttcgtaaaaaatagacttaatatttcacgtgaacatagacaatactttatcgatgtgtcagatcatcgtgaagttaacgatattctctttgttacagacttgttgattagtgattattcatctttaatatatgaatatgcagtatttaaaaagccgatgattttctatgcatttggcttagaagattacattacgacgcgtgatttctatgaaccatatgaatcatttgttccaggtaaaattgtacagtcctttgatgcattaatggatgctttggacaatgaagattatgaggttgaaaaagttgtgccattcttagataaacattttaaatatcaagatggtcgctcaagtgaacgtttagtcaaagatttgtttagacgctaatgttggcatatattacatgccatgcaaatgagtcataaggcatagttttcaagaagggttctgacaatgaagtgagcaacatgtcatgatgagaagcaggactatacaatgagaataaccttttgatttttcatgcatatggcgattcaatcaaaagcaatcaccttccaactgaattgtcattttgtaaaataaaataatcaatccaatcgttatctaattcataaatgtgtaaacacatacgttatgaatggataacgattttttgttatgttaaagtggtacattaatcatgtatttcgtatgataattaacgacaagtgtaatggttaaatgtattttatgctgaaatgctataataggcatgattacaatgagcttgctcatacatattaatataattacaaaaacacgtcggaggtacgacatgattaaaactacaattaaaaaattgatagaacacagtatatatacgacttttaaattactatcaaaattgccaaacaagaatctaatttattttgaaagctttcatggtaaacaatacagcgacaatcccaaagcattatatgaatacttaactgaacatagcgatgcccaattaatatggggtgtgaaaaaaggatatgaacacatattccaacagcacaatgtaccatatgttacaaagttttcaatgaaatggtttttagcgatgccaagagcgaaagcgtggatgattaacacacgtacaccagattggttatataaatcaccgcgaacgacgtacttacaaacatggcatggcacgccattgaaaaagattggtttggatattagtaacgttaaaatgctaggaacaaatactcaaaattaccaagatggctttaaaaaagaaagccaacgttgggattatctagtgtcacctaatccatattcgacatcgatatttcaacatgcatttcatgttagtcgagataagattttggaaacaggttatccaagaaatgataaattatcacataaacgcaatgatactgaatatattaacggtattacgacaagattaaatattccattagataaaaaagtgattatgtatgcgccaacttggcgtgacgatgaagcgattcgagaaggttcatatcaatttaatgttaactttgatatagaagctttgcgtcaagcgctggatgatgattatgtcattttattacgcatgcattatttagttgtgacacgtattgatgaacatgatgattttgtgaaagacgtttcagattatgaagacatttcggatttatacttaatcagcgatgcgttagttaccgactactcatctgtcatgttcgacttcggtgtattaaagcgtccgcaaattttctatgcgtatgacttagataaatatggcgatgagcttagaggtttttacatggattataaaaaagagttgccaggtccaattgttgaaaatcaaacagcactcattgatgcattaaaacaaatcgatgagactgcaaatgagtatattgaagcacgaacggtattttatcagaaattctgttcattagaagatggatacgcgtcacaacgaatttgccaaacgatttttaagtgataacttaaaaacaataaaaaattataaattaattagttaagtgatataaataataaacgaaatgtttgcttgtatgttattatttgtgtatgaaaacgtctgatataatgtaatataggtttaaacaaaatatgctaaaatataagcaaaatatgtataattttaagtaatacacagatgtttagagttttgattttaaaatgagttttcaattgaaaaatgcaacgaaatttaaataattaaatatagatatagttgaatggaggaagtattttatgaaatacgctggtattctagctggaggtataggctcaagaatgggtaacgtacctttacctaaacaatttttagatttagacaacaaaccgattttaatccatacattagaaaaatttattttaattaatgattttgaaaaaattattatcgcgacgccacaacaatggatgacgcatacgaaagatacacttagaaaattcaaaatttctgatgaaagaattgaagtcattcaaggtggtagcgatcgtaacgatacaattatgaatatcgttaaacatattgaatcaacaaatggtattaacgatgacgatgtcattgtgacacatgatgcagttagaccatttttaacgcatcgtattattaaagaaaatattcaagctgctttagagtacggtgcagtagatacagtgattgatgctatagatacgattgttacatctaaagataatcaaacgattgatgcaattccagtgcgtaatgaaatgtaccaaggtcaaacacctcaatcgtttaatattaatttattaaaagaaagctatgcacagttgagtgatgagcaaaagagtattttatctgatgcttgtaagattattgtagaaacaaacaaaccggttcgacttgtaaaaggtgagttatataacattaaagtaacaacaccttacgatttaaaagtagcgaatgctattattcgaggtggtattgccgatgattaatcaagtatatcaattagttgcacctagacaatttgaagttacgtataacaacgtagatatttacagtgactatgtcattgtacgtcctttatatatgtcaatttgtgctgccgatcaaagatattatactggtagccgtgatgagaatgtcttatctcagaaattgccaatgtctttaattcatgaaggtgttggtgaggtcgtatttgacagtaaaggtgtgtttaataaaggtacaaaagtagttatggtaccgaatacgccgacagaaaaagacgatgtcattgctgaaaactatttaaaatcgagctacttcagatcaagtggacatgatgggtttatgcaagattttgtgttgctaaatcatgatagagctgtaccactacctgatgatattgatttaagtattatttcatatacagagcttgtaacagtaagtttgcatgctattcgtcgttttgaaaagaaatctatttcaaataaaaatacatttggtatttggggtgatggtaacttaggttacattacagccattttattacgtaaattatatccagagtctaaaatatatgtctttggtaaaacagattataaattgagtcacttctcatttgtggatgatgtcttctttattaataaaatacctgaaggcttaacatttgatcatgcatttgagtgcgttggtgggcgtggtagccaatcagcaataaatcaaatgattgattatatttcaccagaaggaagcattgcactgttaggtgtaagtgagttcccagtagaagttaatacacgtctagtattggaaaaaggactaacgttgattggtagtagtcgaagtggttcaaaagatttccaagatgttgtagacttatacattcaatacccagatattgtagataaattagcgttgttaaaaggtcaagaatttgaaattgcaacaattaatgatcttacagaagcttttgaagcagacctgtctacatcttggggtaaaacagtattaaaatggattatgtaaatagaaaaggatgaattaacgttggttaaaagtaagatatatatagataaaatctattgggagcgtgttcagttattcgttgaaggacatagtgaaaacctagatttagaagatagtaattttgtattaagaaatttaactgagacacgtacaatgaaggcgaatgatgtcaaaatagatgggaatcaattcgtttgtcgtttcaatgtagctatcttagataatggttattacttacctgaagataagtacttattagtgaatgagcaagaacttgattatattgcacagttaaacccagatgtgattaatgatgcatatcaaaatctaaagccagaacaagaagaagaatacaacgaattagaaacacaaaatggtaaaatcaatttcttattgcagacttacctaaaagaatttagaaaaggtggcatttcaaagaaaacggtttatactgttacacctgaaatttctagcgatgttaatgaatttgtccttgatgttgttgtaacgactccggaagttaaaagtatttatatcgttcgtaaatataaagaattgcgtaagtatttccgcaaacaatcatttaatacaagacaatttatttttaaagcgatatttaatacgacgaaatttttccacttgaaaaaagggaatacggtgttgttcacatcagactctagaccaacgatgtctggaaactttgaatacatctataacgaaatgttacgtcaaaatttagataaaaagtatgatattcacactgtttttaaagcgaatattacagatagacgtggcatcatcgacaagtttagattgccatatttacttgggaaggcagactacatctttgttgatgactttcatccattgatttatacagtgcgttttagacgttctcaagaagttattcaagtatggcatgccgttggtgcctttaaaacagttggatttagtcgtactggtaaaaagggtggaccatttattgattcattaaatcatcgtagctatacaaaagcttatgtatcatctgaaaccgatattccattctacgctgaagcatttggtattaaagagaaaaatgtagtgcctacaggtgttccacgtactgatgtactatttgatgaagcttatgcgacacagatcaaacaagagatggaagatgaattaccaattattaaaggtaagaaagtcattcttttcgcaccaacatttagaggtagtggtcatggtacagcacattacccatttttcaaaattgatttcgaacgtttagcaagatattgcgaaaaaaataacgcggttgtattatttaaaatgcatccatttgtgaaaaatagacttaatattgcagacaaacataaacaatattttgttgacgtttctgactttagagaagttaatgatatactgttcataacagatttattaattagtgactattcatctttaatatatgaatatgcagtatttaaaaagccaatgattttctatgcatttgatttagaagattatattacgacgcgtgatttttatgagccatatgaatcatttgttccaggtaaaattgtgcaatcatttgactcattaatggacgccttggacaatgaagattatgaaggagaaaaagtcattccattcttagataaacattttaaatatcaagatggtcgatcaagtgagcgtttagtcagaaatttatttggtagctaagtttatatagtagtcaaagtgggagaggtataatgatgaaattttcagtaatagttccaacatacaattcagaaaagtatataacagaattacttaatagccttgcgaaacaagattttccgaaaactgaatttgaagtggttgtagttgatgactgttcaacagatcaaacgttacaaatagttgaaaagtatcgtaataaattgaacttgaaagtaagtcaactcgaaacaaattctggtggtccaggtaaacctagaaatgtggcgttaaaacaagcagaaggtgaatttgtattatttgtggactccgatgactatataaacaaagagactttaaaggatgcagcagcatttattgatgaacatcactcagatgttttattgattaaaatgaaaggtgttaatggtcgtggtgtaccacaatctatgtttaaagaaacagcacctgaagttactttgttaaattcaagaattatctatactttaagcccgactaaaatctatagaacagcattactaaaagataatgacatttattttccagaagaattaaagagtgcagaagatcaattatttacaatgaaagcatatttgaatgcaaatcgaatcagtgtgttaagtgataaagcgtattattatgctacaaagcgtgaaggggaacatatgagtagtgcgtatgtttcacctgaagacttttacgaagtcatgagattgattgctgtagaaatattaaatgcagatttagaagaagcccataaagatcaaatcttagcagaatttttaaatcgtcattttagtttttctcgtacgaatggcttctcacttaaagttaaactagaagagcaaccacaatggattaatgctctaggagactttatacaagcagttccagaacgtgtagatgcattggtgatgagtaaattacgaccattgttacactacgcgagagcgaaagacatagacaactatagaactgtagaagaaagttaccgtcaaggtcaatactaccgttttgatattgtagatggtaaattaaacattcaattcaatgaagacgaaccatattttgaaggcattgatatcgctaagccaaaagtgaaaatgacagcatttaaatttgataatcataaaattgttacagagctaacgttaaatgaatttatgattggcgaaggacattatgatgtcagacttaaattacattcacgaaacaagaagcacacaatgtatgtacctttaagtgtcaatgcgaataaacaatatcgttttaacattatgttagaagatattaaagcgtatttacctaaagaaaaaatttgggatgttttcttagaagtccaaataggtacggaaatatttgaagtgcgtgttggtaatcaacgtaataaatatgcttatactgcagaaacaagtgcattaattcatttgaataatgatttttatagattaacaccgtatttcacaaaagactttaataacatttcgttatactttacagctattacattaacggattcaatctcaatgaagttaaaaggtaaaaacaaaatcattttaactggtctggatcgtggttatgtatttgaagaaggtatggctagtgtcgtgctaaaagacgacatgattatgggaatgttaagccaaacgtcagaaaacgaagtggaaatcttacttagtaaagatattaagaagcgagacttcaaaaatattgttaagttaaacactgcacatatgacttactcgctaaaataaataacaaacatactaagattagctatgaagaaatctatgacgatagattttttcatagctattttttatagttatagagaggagtagactgtgcgttctcttgggtcttaaacccgtataaaaaacaagtcagctttactctcgccttttgaaattcgtttgaagtatgttgggttcttgaaaccgtgtagaggaaaatgaaatgagaaaggttaagtaaagttctcacttctcaattttttaaaggaggctatatttatcaattacttaggtgttgatattagtaaaagaagtagtgtcgtagctcattatcataacgatcaatttcaaagagaatttaccattcaaaataataaaaatggttataaatatttattaaagtatttgaatgatttagaccacctacaaatcatttttgaatctactggtatttattcaagaggtatgactcgattttgtcgcataaatcaaattaattatattgagatgaacccgttagaagctaaattcagaacaagttctttaagatcatggaaaaccgatcaagctgatgcacataaacttgcgcaattagcacctactttaaaagcaatggaaaccttacctatgtatgaatctatcttctttgagttgcgagagcgtgcacgttttcatctagaaattgaaaatgaacaaaatcggcttaaatttgaaattgttgaacagcttcatcaaacttttcctggtttagaaaaattatttagtagtcgatattctatcattgcacttaacatcgcagaacgatttactcatccagatatggtgagaaatatggatattgatactcttatttcttatatattcaatacgactgataaaggtctatctatgaataaagctgaaaatcacgcacaccaattggttaacattgctcgggaaagctatccgaatgtcgatagacattcatttcttgtagaaaaagcacgattgttaattagacatttaaaacaatctatacaacatcttaaacaattagatgaagacatgattcaattggcgcaacaacttgattgttttgaacatattcattcaataccaggcattggaaaactatctgcagctatgattattggggaacttggaaatattacgcgatttaaatctaataaacaattaaatgcatttgtaggcatcgatatcaaacgatatcaatcaggtagtacgcaaagtagagacacaattaataagcgtggcaataaaaaagcaagaagattactgttttgggtggttatgaatataataagagggcagcatcattatgacaatcatgtagtcgattattactataagctaagaaaacagcctcatgagaaagctcacaagactgccgtcatcgcttgtattaatcgtctcttaaaaacgattcattatttagtaatgaatcaaaaattgtacgattatcaaatgtccccacattagccaaccgtacaatcaaatacagtgtaacaccttattcaaaaaaattaaattgaacgggctaatttagtaatgcttattttaaacataaagacttgactaatcgtaggaaagaggctgggacattaagtttttttgatatgcattttataatgtacagctcgttgagctgctattttccttatattaagtgccattaatacaaaacctatggcactagcttctacttttgtaccatcaataaaaattgaattatcatcaataagattttgctttaaacattggctatggaactgaataaataaagattcaattaacgcatcagtgttaggattcactctaaaacgattaatagttttataagaaggtgtttgattttgagctaaccacatcattcgaatactgtcatgaagtaatttttctattctacgaccagaaaatacagattgagtatatgcatataagataatttttaacatcatttttggatgataggatgttgcgccacgatgatgtctgaattcatcaaattcactatcaggtatcgtttcaacaatttcattaacatatcgcgaaatatcattttgaggaattctaacagaagtttctattggtagtgtaagttgggcaaagtgtcttatttttttaaagtatttcaaagtaaaattacatgttaatacgtagtattaatggcgagactcctgagggagcagtgccaagtcgaagaccgaggctgagacggcaccctaggaaagcgaagccattcaatacgaagtattgtataaatagagaacagcagtaagatattttctaattgaaaattatcttactgctgtttttttatgaaaagaaaaccatacgctatgcgtatggttcagaaaaaggttctaccattgtcacaaaaaaatgcatctctacgtgctagaataaatattggtcagccaaccaaaataatcaacacgaggagatgctatttaatgtcatctgacacaaacagtttagcacatacaaaatggaattgtaagtatcatattgtctttgcacctaaatacagaagacaagtgatatatggaaaaataaaaaaagatatagggattatattgcgtcaattatgtgaaagaaaaggtgtagagataattgaagcagaggcatgtaaagatcatatccatatgttagtaagtataccacctaaacttggggtatcatcatttgttggctatttaaaaggaaaaagtagtttaatgatatttgatagacatgctaacttaaagtatagatatggaaatagaaagttttggtgtaaaggatttttatgtggatacagtaggtagaaataaaaaagtgattgaaaattatattcgtaatcaattacaagaggatatcgttgcagaccaaatctcaatggaagaatatttagatcctttcactggagagaaaaatagaaaaagaaagaaaaaagagtaaccctttagggttgctgaaatagtagtgcagttggctgacttgtcagtgcccttttagggctggccagtaaggaaggcttatagccgcagaacaaaccacccgttcacacgggtggttttgattagggatttatatcccagcctcgttttattttgctatttatgaaatgattatgacatttccctgattttcattttcatatacattaaattgtatacactgaaaatgaggaggtcgtctataatgataaataaaaatgatatagtagcagatgtagtaacagattatccgaaagcagcagatatttttagaagcgtaggtatagacttttgctgtggtggacaagtaagtatagaagcagcatccttagaaaagaaaaatgtagatttgaacgaattattacagcgtctcaacgacgttgaacaaacgaatacaccaggttcgcttaaccctaaatttttaaatgtttcgtcacttattcaatatattcaagcagcatatcatgaacctcttagagaagaatttaaaaatttaacaccttatgtgacgaaattatcgaaagtacatggacctaatcatccatatttagtcgagttaaaagaaacatatgatacatttaaaaatggcatgttagagcatatgcaaaaagaagatgatgttgattttccaaaactaattaaatatgaacaaggtgaagtagtagacgatattaatacagtgattgatgatttagtatctgatcacattgcaacgggacaattgttagtgaaaatgagcgatttaacatcaagctatgaaccaccgatagaggcatgtggtacttggcgactcgtttatcagagattaaaagcacttgaagtgttaacacatgagcatgttcatttagagaatcatgttttatttaaaaaagtatcataaatagcgcgattagaaactgttggcaaagtaatgtcagcagtttttcgctatacttaacagaaatttagtgacatgatagtcattattttgaaaaggaaaattgtcaacttagcataagaattgatatgaaattttaatggtataggtaattaaatagtagcgtgtttttttaataatttattcatgaattttacatgcactattatgataaaataaacataattataattcactgaggtgctatcgtgctatcgctaacaatgttattacttgagcgtgtaggtttaattattattttggcctatgtgttgatgaatattccatattttaaaaacttaatgaatcgtcgacgtacatggaaagcacgttggcaattatgtattattttcagtttgtttgccttaatgtctaatttaactggtatcgtcatcgatcatcaacatagtttgtcaggaagtgtgtacttccgtttagatgatgatgtatctttagctaacacacgtgtattaacgataggtgtcgcaggattagttggtggcccttttgtaggtctatttgttggcgttatttcaggtattttcagagtgtatatgggtggggcggatgcacaagtttatcttatctcatctatatttatcggtataattgctggttattttggtttacaagctcaaagacgcaagcgttacccgagtattgcgaaaagtgccatgattggaattgttatggaaatgattcaaatgttgagcattttaacattttcccacgacaaagcatatgcggttgacctcatatcattaattgcactaccaatgattattgttaatagcgttggtacggcgatttttatgtctattatcatttcaacattaaagcaagaggagcaaatgaaggctgttcaaacacatgatgtactgcaattgatgaaccagacattgccgtattttaaagaaggattgaatagagaatcggcacagcaaattgcgatgattattaaaaatttaatgaaagtatctgccgtagcaattacaagcaaaaatgaaatcttgtcgcatgtaggtgcaggtagtgatcatcacataccaacaaatgaaatattaacaagtctgtctaaagatgtattgaaatcagggaagttgaaagaagttcatactaaagaagagattggttgtagtcatccgaattgcccgcttagagcagctatcgtgataccacttgagatgcatggttctatcgtcggtacattgaagatgtattttacaaaccctaatgatttaacttttgtggaacgtcaacttgcagaaggattggcaaatatttttagtagccaaattgaacttggtgaagccgaaacgcaaagtaagttattgaaagatgctgagattaagtcattacaggcacaagtgagtccacattttttcttcaattcaattaacacgatttcagctttagttagaataaatagtgaaaaggcacgagagttactattagaattgagttattttttcagagcgaatttacaaggctcaaagcaacatacgattactttagataaagagttaagtcaagtgcgtgcatacttatcactcgaacaagcacgttatccaggaagatttaatatcaatattaatgttgaagacaaatatcgcgatgtgcttgtaccaccatttttaattcaaattttagttgaaaatgccatcaaacatgcgtttacgaatcgaaagcaaggtaacgatattgacgtgtcagtgattaaagaaactgcaacacatgtacgtattattgtacaagataatggtcagggtatttctaaagataaaatgcatttgttgggagaaacatctgtagaatcagaatctggaactggtagtgctttagaaaatttaaacttacgcctaaaaggattatttggaaaatccgcagcattacaatttgaatcgacatcgagcggtaccactttttggtgtgtacttccttatgaaagacaagaggaggaataaatatgaaagcattaatcatagatgatgagccattagcacgtaatgaattaacatatttattaaatgaaattggtggttttgaagaaattaatgaggcagaaaatgtaaaagaaacattggaagcattactgataaatcaatatgacattatatttttagatgtcaatttaatggatgaaaatggaatcgaattaggagctaaaattcaaaagatgaaagagccacctgcgattatttttgcaactgcacatgaccaatacgcagtacaggcatttgaattaaatgcgacagactatattttgaaaccgtttggtcaaaaacgtattgaacaagcagtcaataaagttcgtgcgactaaagccaaagatgataatagcgcaaatgcaattgcgaatgatatgtcggcgaattttgatcaaagtttacctgttgaaattgacgataaaattcacatgttaaagcaacaaaatattattgggattggcacacataatggtattacaaccatacatacaacgaatcataaatacgaaaccacagagccattgaatcgttatgaaaaacgattgaatcccgcttatttcatacgtattcatcgttcatatattattaacacgaaacacattaaagaagtacaacaatggtttaactatacttatatggtaatattgacaaatggtgtcaagatgcaagttggacgttcatttatgaaagattttaaagcgtcgataggattactttaacagtaatccttttttttatgcattttacctatgatattttgtatttcggactaaaattcacgcaaatcgaagtgagccatctatactttagttaaatcaaacgtaggaggcaatggtcgtgaaacaacaaaaagacgcatcaaaaccagcacacttttttcaccaagtcattgtaattgctttagtactctttgtatcgaaaataattgaatcatttatgccaattcctatgcctgcatcagtaatcggtttagtattattatttgtattattatgtactggtgctgttaagttaggcgaagtcgaaaaagtaggaacgacactaacaaataacattggcttactcttcgtaccagccggtatctcagttgttaactctttaggtgtcattagccaagcaccatttttaatcattggactaataatcgtctcaacaatactattacttatttgtactggctatgtcacacaaattattatgaaagttacttcgagatctaaaggtgacaaagtcacaaaaaagatcaaaatagaggaggcacaagctcatgattaaccacttagcactaaacacaccatacttcggaatactgttatccgttataccatttttcttagcgaccatattatttgaaaaaacaaatcgtttcttcttattcgcaccgctatttgtcagtatggtatttggtgtggccttcctctatttaacaggcattccgtataagacttacaaaataggtggagacattatttacttcttcttagaaccagcaacaatctgttttgcgattccgttatataaaaagcgtgaagtgcttgttaaacattggcatcgtatcatcggaggtattggtatcggtacagttgtagcgttattaattattttaacttttgcgaagttagcacaatttgccaatgatgttattttatcaatgttacctcaagcagcaactacagcgattgcgttaccagtatcagctggtatcggtggtataaaagaattaacatcattagcagttattttaaatggtgtcattatttatgccctaggtaataaattcttgaagcttttccgaattactaaccctattgcccgaggattagcacttggaacaagtggtcacacattaggtgtagcaccagccaaagaattaggacctgtagaagaatcaatggcaagtatagctttagtgttagttggtgtagttgttgtagcagttgtgcctgtctttgtagcaatattcttctaaaacgaaaaacctaagcaagataatagcaatttgagccattgttattatcgtaaaaaaacgtctatattccggtttaaaactgggatatagacgtttttatgtatgtattactttttactaggaatataaaactgtgcatgacgataatgaaatacgatgtcagacgaatcaaagggtttgccagtcattgtataaaaagtctggtggtaacgtaaacatggttcacctgtagacaattgtagtaatgaagcttcacttgaagtgagtttatctacattaaagaaaatatctgaaaaaccaatacgaagtttcatgtttgattctaaataatcgaagatagagcccttagcaatatcatcatttaaatatttcacgatttctttatgataataagaatattcgatacataaaacatcatcgtccacgaatcttaatcgctctaaatagtagacggtatcatctgcatttaattggagctcatcttgtacagatttaggtggcgttgcaatctccttaaaaacaagtactttacttgtcattcgatgttcacctaaacttttagaaaaaccattagtcttaaagacgttgatacgattggcatctgcaatatttctcacataaataccactgccttgtgcttgatagatcaaaccatcttgttccaataatcctaatgctttaatgatagtactcttacttacttgataacgttcttttaattgcgtcacgcttggcaatttatcaccgggtttgaaattagattgatgtataaacgcattaagttgcttagcaatatgttcatactttaacaatattctgtcctcgtttcactttgtctgtaattattatagcacaaaatattataattgtatcggcgtttgcaaattgaaccggtacaattataattgaaggtaagtaaatacattttcattctactatcaagttgagggggtaatatttatgagtaataaatataaagaccaagcccaagacattcttacagctgtgggtggtgtcgaaaatattgttgatgtaacgtatgacacgaagtgcattacaattcatatgcaacatacaattccttctacagcaaatgaagtgaaacaaatagttgatgtgacatctgtagcagaaaacgatgcgcagttagtcataaaattaaacgaaaatgtcgatgaagtgtatcagcaattacagcgattaattaagaatgctaatgttgaaaaggatgcgaatactgacaatattaatagccaagatacaagttatacacctcaagtaaaagtaacaacaccaattttagtgaaagcaccaatcgctggtcgtcgtattttacttaaagaagtaagagattcaatttttagagagaaaatggtaggtgaaggcttggcaatcaaagctcatgaagaatccaaagtaatcgcaccggtcaatggtttaatatctatgattgtaccaactaagcatgcagttggtattcaatcagaagacggtgtggacatagtcattcatattggcgtgaatacagttgacttggaaggtaaaggattcaagtgctttgtaaagcaaaatgatcgtgttgaagcagggcaaacgttgttacaattcgaccagcaatatatacaacaacaaggctacaatgctgacgttattgtcgttattagcaactctgccgatttaggaaaagtagaactgacaatgaatgaaatcattacgactgaagatgttatttttaaaatatttaaaaactaggagtgtgttgtaataatgacaaaattaccgcaaaattttatgtggggtggcgctcttgccgcaaatcaatttgaaggtggatatgataaaggtggcaaaggattaagtgtaattgatgttatgacgagtggtgcacatggcaaagcacgtcagattacagaatctatagatccaaatcactattatccaaatcatgaaggtattgatttttatcatcgctataaggaagatattgccttgtttaaagaaatgggaatgaaatgtttacgtacgtcgattgcgtggacacgtatctttccgaatggggatgaagatgtgccaaatgaagaaggacttgccttttatgatcgtatctttgatgaattaattgcacaaggtattgaacctattgtgacgttatcacattttgagatgccacttcatttagcgaaacattatggtggatttagaaatagagaagttgtcgattattttgtgcattttgcgcgtgttgtatttgaaagatataaagataaagtgacatattggatgacgtttaatgaaattaataatcagatggacacatcaaatcctatctttttatggacgaattctggggtagcattaacagaaaatgataatcccgaagaagtcttgtatcaagtagcacatcatgaacttttagccagtgctttagcggttcgtcttggtaaagagattaatccgaaatttaagattggaacaatgatttcacatgtacccatttatccatattcgtgtcatccgaaagatatgatggaagcacaaattgcgaatcgcttacgcttctttttcccggatgttcaagtaagaggttattatccaagctatgctaaaaaaatattggcacgaaaaggatatgattttggatggcaagaaggggacgacagtattttacagcagggcacggttgattatattgcctttagttattacatgtctacggctgtaaaacatgatgttgatactacagttgaaaacaacatcgtcaacggtggtttgaatcattctgtggagaatccgcatatcgcaacgagtgattggggttgggcgattgatccagatggcttaagatatacattgaatgtgttatatgatcgttatcagttgccactttttattgtggaaaatggttttggtgcagttgatgaagtggtagatggacatattcatgatgattatcgcattgaatatttaaaagcacatattacagcagcgatagaagcagttgatcaagatggtgtagatttaatcggttatacgccatggggaatcattgatattgtttcatttacaactggtgaaatgaagaaacgctatggtttaatatatgttgatcgagataatgatggtcatggcacgatggaacgcttgaaaaaagattcgttctattggtatcaacaagtgatagcatcaaatggagataaattataaaggtatattataaatattttagggttagagcccgagacataaattaatgtctcaggccctacagtgttatattggcgggctcccaacatagagaaattggaacagcaatttctacagacaatgcaagttggcggggccccaacacaaagaatttcgaaaagaaattcaacaggcagtgcaagttggggagggacagaaataaattttgcgaaaatatcatttttatcctactccctttatcatttctgttccaatcccgtgatgttaaaattttaagaaaaaaataatgccactaactaagtatgtatagtgttaatgtttgagtgtttatgaaagtctttaaccaaaattgatgacttactaatcaacgataacgatattgttaagtagatgattagtgtcacaaagaaattaaagtagcagtcaaacatagatacaaagtacagttagtggcattatatttagtggtcttttttagcgacaaaagtaatataattcatatctttacgcagtctagtcatcgtttgaaacattttacaaaacattggtcgattttctttttttaaagcattgttgataatctttaaagttccaacaataccttcgtcataaattaaaccttttggtgtcattaaactcattggaccagtatgataatgtacatgattaaaaccagcttgatgatataaatctaaccagccaagtttcgtctgcggtgagacattgacattaattgctgcagataatgatttaactacatgtgtggcatgtgattcattaacgatgacaatatcatgtgttaacaagatacccccaggctttaagactctgtagtactcgcgtaatgctttttcctttatggcgatgggtaacattgttaacatcgcttcatttaaaacgatatcgaattgattgtcatcaaagggcaatttaacagcattcgcttgttgaacttgaatatatgattcaagacctgctgctgagatattttcctgtgctttttctaatgctttcttatttatatcaacgcctttaatgtgacagccatatgtatgagctagataaatagatgttgtgcacatattacatgccacttctaacacttgtttatcttgtgaaaatgccccttgttgtattaaccaatccgtggctgctttaccaccggggcgtagacgagtttttcctaatttagctaaaaatgtatgaccagcttctttggacatagcataacctccttttaattgataattattatcattaatatagcatatttatatgcgataatttggaagttaaaaagattacaaaaaattgtcacttcatttataactaaacatgagtcatcaagcataggtttagtggaaaattatttctaatagatgatgttttataaagataaaaagcacagccatgatatacgaatgttgcatgttatatgctaaaccttcatatcatagctgtgtttgattcatttaaacttgatttacttcttctagtagaggaatagatgcttgcgcgccgtgtttttgtacagtgagggagctcgctttattaccaaaatcaatagcatctgctaagttatcttgcgacttgtttaagcgactgacaaatgcaccaataaatgtgtcgcctgcagcagttgtatcaatcgcatttactttataagcttcgatgtgttggctttgatttttagtagcaaaatatgtaccttgcttacctaacgtaatcaaaacagtcttaatgcctaaagataaaaagtaattagcattgtctttcatagattgttcattagttactttaatcccagataacaattcggcttctgtttcgtttggcacaataatatcgattagtgacaataattcattaggtaatgctttcgctggtgcaggatttaatacagtcgtcacaccatgtgccttggcaatttcaaatgcagatataatagccgggatgggtacttctaattgtgcaacgacaaagtctgcattgattatagcgtcttttgcgttaataacatcttcaggtgtcatcgtcatattcgcaccaccataaacatagatggtgttttgtccttctgcattcacagtgataaaggcttggcccgtttttgcttcagttgttttgataatatatgatgtatcaatatgagccgctttaaaatcttctaaaatgaaatcagcaacgccatcagtgccaattttagtaataaatgttgtgtctgcttgcatgcgtgcagtggcaatagcctggttggcacctttacctccgccgaatgctttttgtgcttcttcaacatgtaatgtttcgcctggttgtgcatatctttcaactgttaaaaattgatcgacattcgttgaacctaaaataacaactttgttggtcatgtgtatgctcctttcaagttataatttttaaaaagtaacattcgattctaatgcaatattagagtagggcgttgtttcaccagtacgaatattacctttatttaatgggtgagctaagttacttttcatttcttcgtgaggaatgaaaatgatttcgatttccgatgaaatcaattgtttaatttgttgcaattgtgtagggttatgttcttttatttcttctgctaagtatattttttggatttccatttcttctaacactgtagctaagacatcaataaagcgtggtaagtttttagtgatagctaggtcgatacggcgatgatcatttggaattggcatgccagcgtcattaattgttaataggtcaaaatgaccaattgtcgcgattgcttttgaaatatgttcatttaaaacagctgattttttcatgacatctacactccttattttataaatactgtaacagaagcggctactaaaatgagtactaagccgataattgtaataatcatttcttttgacgttttatgttgttttaagaaataaataccagttaatgtagcaagtacaacggatgtttgagaaagaataaatccagttgctaaaccattcatattaggttgtgctgaaataagatatgttaaggcaccaaatgcaaagaagaaacctgaaataatttgtaaccacgtaattttattacgaaatgggttctctgctttcatattcataaagccataaatgactgcaacaattaccatacccattgcttgaggtaaaaaggcagttaggccatcaatagaagttgcttgtggtgcggctgaatataaccagtatccaaattcaccaattaacagaagaatcactgcacgacgtaaatttttggcgttacttgcttctttgcgttcactccaaactgtcatacgcgcaccaattaaaataacgactaaagctgtaaagccaatgattttatgaccaatgcccggccaatttcctaatgcaaagacaccccataaagatgcgcctaataattggaatgctgttgtgacaggcatggcacgagatgaaccgactaattcgaacgctttaaatgtaatgatttgtccgaatccccatcccgcacctgataataaggcgaatagtaaatttgttccagtagggaagccacttgatgtgactacggctaatataatagcgaagattaacgtacctatagtagcaccgataatttgatgtacaggtttaccaccaaactttgaagcgactgttgggaagaatccccagccaattaaggggcctaacccgataagtaatgcaacaatgctcatgttatacacctcacgatttgtttttagtaaaacgttttaccagtgccatcgtaccatttttatttgtaaaatgcatgcgttttcataaaaaatgaaaacgtttaaatcacagttaaaaattcatacattattattttaatttcttagtgaaataattatgattaaaaaccctcagcattaaagcaacgctaagggcctaacaatgatgagtatatttcggaagatacgtagttagtttgaaagatgatagccagttgttgcacgaatttttaaagtcgttggtaattcaattatatcaatggatttatctaagtgttgtaatcgttgaagtaataaggttaaagatgttttgccaatatcagttataggttgtgccacagtagttaaaggtggcgtgacatacgcggcataatcaatatcgtcataacctattaatgagatgtctttcgggatactgatgccatgttcaattagtcctcgtaaaatgccaatagcgagttcatcgttaatagcgaagattgcagtggcagattgaaccatgatgtcatcaacaatggttagcccaccgcgcttagataattcagtatggacgatttgtggttcgggcaattgattagtgcgcaaagtatcaacaaatccagcgacacgagtcgacatattcgccatcatgtcatatggtacaacaatcatcatattgttgtgaccgagttctattaaatgttgtgctgcaagttgtccgccttgatattcatttgtccgaacaaaatctgtatagccttgatggtcattttgatccagtacgacataaggtacatgatgtttctttagatagttatttagggcgtccggggatgaaatgtattgtgcgataattaatccgtcaatacctcgctcaattaaatgtttaatattgtcatacaaatcagttgctgtagatgttaaaaagcataaatcaacatcagatggtttgttgtcatgaatactttgcatcagtgctgagaaaaacggatttgttaagctaggcaaaatgacgccaatagtttgaattttactgccgcgcaattgttttgcatgtttgttaggggcatagcctaaacgttctgaaacagcatgtacgttttttatcgttgttgcggaaaaacgactatcattatgatttaaaatatgtgacaccgtagtaactgatacaccagcttctctagcaacatctttaattgacacttttttcatattatattccttctctttattgtgtaattaatcatacagttatatacccgattattatattcatcatatcatgataagcatttgatgacatatgaagaggtgcatgacttttattgtctacaaacaggcgtctttagtatgcgattaaggttgagacgagagaatatattattaaggttaaataacttttaatgattatgataacaagaattttaaaatgtttattgtggtgaaaaatataaaatccattattttaaataatgaaatatttgtttttcaaaaaagtattaaaaaatataacagaatgatgtatattgaactatgtgattgaaaaaatttttaattaagacttgttaaaacttaagagaggatgtttttaaatgcaattcaaattaaaagaagaagagattattagttttttagaattgaaatatccagaaaaagagttcgaatatggtcgtttgttagttggacaacataaacgtgatgatttagatgtttattactttggtgatacgtttttaatgtgcacgattatttcattcaaaacatttgaaattaaagaaacagtagaattatcatatgatgctgttaatcgtattgtgttaaaagatggatggttatttagaaaaatgagaatagaaacaatgcaaaaagcgttaaaatacggtacatctaaattaatgttaactgattttcaaaaggacaattataataaatatattcaaggtcagaaacaacgcgtgatatttgaaaatggccattttgtctaattgatagtgaataataattagagtatgcgaagaacaataaaaaatgttcttcgcttatttttatagaaattgatgcatatcattttaaagtgataaagatatttcgaaacatgattcttctattatatttaagatttaactgtttttggaatgatcatgtatgcagacaatgagccgagtatcattaatacaatgctgacgataaatgttacagttgcagctacacttggtgcatagtttagttgtaacatactgaaaactgtagtacttagtgctataccaaaggcgccacctagtgtgccactcattttatataatcctgtagctaaaccaactttttcattaggcatactgaaaattgcaattgtaagaccgggtgttgcgactaaaccatttccgattgcgcaaatgacaaacccaataacaacagcaatgatatattgtgatggttgaagtgatgtcatgctaataatagtgatgccgatgacagggaacaacggaccaatgatgagcattaatttgccaccgaaacgtaatgttgctttttcacctaaacgaatcatcgcaactgccacaatggcatatggcaatgtaacaagtccagattgcgcagctgataaaccaaggtgtgtttgagcatatatgaaaaagaccactgttacgcccagaccactatttaaaacaaagttatttaaaaatgcaccaatgaacggacggttgcgtaatactgagaaatcaataaaaggtacttcatgtcgacgttcgatgatgatgaatatcaacgtagtgatgataaaaatgctcagacaaatgaatgaaaatgcactaaaccaaccttgttcgaatccttgtgttaacaataatgtaaagctaccaatcataacagcgaaaatagacatacctttgtaatcgaatggatgacgatggctatgttgacttactttttcaggtgtgccttttagaagcaatatggcaatgaaagcaatgactatactaatgatgaaattcgtttgccatccgaaatttgtggcaattaaaccgccgataacaccagctaggccgatgccaccaacagtactaatcattagataactaatcgctcgtcttaaatgatctcctttaaattgattatttaacacgcccactgttgaaggtaacaagatagctgctgatagaccttgtaaaattctaccgatgatgagcagtgcagtgatgtccgatataattaatagaagagatgcaaccatactgattatgagacccatgtatgtcattctcagttgtcctattttatcagcaatatcacctgcagccaccatgaagatacctgtggcgaaggaagttaaactaatagataaatttaacacggcaggagaggtttgatacgtttgaccaacgagaggtcctatattaataaatgattgtgcaaacaaccaatatgttaatgcagacaacataatcgcaataataatattactgcgtggtgaagattgtgtgttattcacagatgtcactccttgtaaaaattaaatatagaaagtcatgagatgaagtgaacggatgtatagatgatcgttcactcacacataagtcatgatttccttacatatcataccacagttattgagaatgaatatcaattaattgcttgtatgattgattttttatagtatgtttaagtgaaacagctttatttgaaagtgattaaagtaaatgaaggtacagaggagtgagaacaatgtgcacaggattcacaatacaaactttaaataatcaagtacttcttggacgcacgatggattatgattatccattagatggttcgccagcagtgacgcctagaaattatcgttggacatctcgcactggcacgacaggccaaacgcaatatggctttattggtacaggaacagatatggaaggttttatttatggtgatggtgttaatgaacatggcgttgccatttcaacacaatatttccgaggttatagttcatatggctcaacacacaaagcggatgcgatgaatattacgcaaaatgaaattgtgacatggattttgggatatacaacaagcattgaagatatgaaacaacaagcatcccaaatacatgttgtagctgtatatttaaatgatatcggtgaagttccgccattgcattatcatgtttccgatgcaactggacattcagtcgaagtttcatttaaagagggtgaagtgattataaaagataaccctattggtgtcttaacaaatcatccagacttagattggcattatagtaatttaagacaatatatcaatatttctccttatccagcaacagcaaatttattggaaggtgaaacgattgaacctttaggcaatgaagcaggtacatttggattgccaggtggatttacttcaactgagcgctttgtgagaatggcatttatgaaagcaaacattgctcaaaacaatgataaagaaatggatttaatgaatgcattttatttattagatgcggtaaatataccgattggaattgtacgtccgcatgatgctgacaatcactatacaatgtatcagaccgtaataaatttaactacaagaacgttatatattaagtattatggcagcaatgaaatagtagcattaaagctcacagatgatttaattaatagaaaagatatgacgatttttaagcctgagaagcatatcactattaaaaagttgaatgacaatcaatagcgattgagaatggaatttggttgatatgatttgatggatgattactatcatacattagcgttgaaccgcgaacatggacgaatgattagttgttaattttgaaaatttataaaaggttaaacgaatgcagtgagagatgtcattttaatatcaatgtatggctattttgtaatgacaatgtaatgagtttagtaaaacatttcgggaatattaaatagttggaaaatgagaattaaatcctttactcagttgtctaattcttttagtatgtgcagtacagtttaattgaaaactaactttaactttaatggaggatgttttatacatgaaaaaattaacagcagcagcgattgcaacgatgggcttcgctacatttacaatggcgcatcaagcagatgcagcagaaacgacaaacacccaacaagcacatacacaaatgtcaacacaatcacaagacgtatcttatggtacttattatacaattgattctaatggggattatcatcacacacctgatggtaactggaatcaagcaatgtttgataataaagaatatagctatacattcgtagatgcacaaggacatacgcattatttttataactgttatccaaaaaatgcaaatgctaatggaagcggtcaaacatatgtgaatccagcaacagcaggagataacaatgactacacagcgagtcaaagccaacaacacattaatcaatatggttatcaatcaaatgtaggcccagacgcgagctattattcacatagtaacaacaaccaagcgtataacagtcataatggtaatggaaaggttaattaccctaatggcacatctaatcaaaatggcggatcagcaagtaaagcgacagctagtggtcatgcgaaagacgcaagctggttaacaagtcgtaaacaactacaaccatatggacaatatcacggtggtggtgcgcattacggtgtcgactatgcaatgcctgaaaattcaccagtttactcattaactgatggtacagtagtacaagcaggttggagtaactatggtggtggtaatcaagtaacgattaaagaagcgaacagtaataactaccaatggtatatgcataataatcgtttaactgtttcagctggtgataaagtcaaagctggtgaccaaattgcatattcaggtagtacgggtaattcaacagcacctcacgtacacttccaacgtatgtctggtggcatcggtaatcaatatgcagtagacccaacgtcatacttacaaagtagataatacagtaaatcccaagttacgatatcatacgcaacttgggattttttcgttttaataataggtataagcccattgcttgtcctctaaaacatgttgataaaaaggatcttggccaattaacttgatatcatctgcaagtgcttcaacttcatctaaatgatgggtagttaatataattaaacatttagatttcatgatgttaagtagttggtggatgtcatgtctagattttaaatcaataccaactgtcggttcatctaaaatgagaattcgaggttgacctagtaaacctactaatatattaattttacgtttattcccaccggacaatgtagatactttggcagacgtatcatcaaagtttaattgctgtaaatattcgttgatagttgtatcgttaattggatttttacaaagtgatttaaaaaatttaatgttttcagccactgtcatgtgttcaaataacgcaatgtcttgtggcacataaccgatgtgattttgtatttgtctttgattccatttttcgccgaaatagttgatagttccatcattagctttttcaataccagcaatcatacgaagtaatgttgattttccagcgccattatcgccaagtaatacggttaaacgattactatcaaaggacatggttaaatgattgaaaatctgtttgttacggtaacgctttgaaaggttattaatttctatcatcagttacgctcctttacatgaaaatggtcaagtatacgatacccatagcaagtgcatatataaatgtcatgaataatcgatgacttattgtttgaatatggaataagataaagacgatacctatctcataaatcaatataagtaacagtgattttaagtaaaatattaagctgagtggttgagacaaatatagactaactgccaatagtaccaacaataacaagatcgtatgtgtcattacataagtactatatagtttgaaacggcttaaatgatattgtgataatcgttgcaatgctgcttgttggtttaaacgataatgaagtactacttgaacagcgctaacaaataaaatcaccgcaaagattaagctaattgaaatagagtgttgtgcttgtttagtaagcgacacaaatttgattttagattcaggtgtatgtttatgataggacttgttgatagcatcgatggattgatgctgtttcatatcctcaaggtgttcataaataatgttaggaatttgctgttcatataatgaactactaacaatttctacagcaataccacctataaagtcatctctaccatataactgtatcgtttcttttaaacggttctcttttaatttttgagagaaacctttaggaatttgcatacttaaaatagcttcctttttagtaacatcatcttcaatatagctttcatcttcatcgacttttttaatagttacatagtcagattgtttaattttattgacgaatgattttgatgcagtggtttggtctaaatcttgaatggtaatcggtattttgaagttgtcatgtgctacacggtaacccataccaataagtacgagtgcgatgacaatggttgttacgagcaagatgtattgtaaccattgcttgaacacaacaagttgtatataaggcttcattgacgatacctccaaaccaatacagctaaattaattatcaaaagtgcgatgaagctaagatagaagctagggtgcagttctaaaatgtagttgtttaaaataatttctaacaattgatttgttacaactgcgaatggttgaatattgaaaacgccatttgctatatgttgtaaaaaaatcgtaggtattgttaaaccagataacaccaggatgacaatagctaatatgactttactaatactattcaacaagcctgttgttaaaagttcgatgagtaataaccacagtattaaaaaggtaacataatagcttaaatgaatggctaacgttggccaattatataattcaaaggtattcggaatactgaacataatccaaactacaccaacgatactccataacatagtataaaaccatgtaatcaacgcacgaatgattaacaaacgctctttagaaaaatgaaacattttcaatcgcgctttcaatacagtatcttgattcattttcaaaactgtaaataaagatagtgcaaagatgaataccgttgttaaaaatcctgtaattgcataataactgcccgtatcgtataaatgaatcggttctaagttaaatgcatctgaacggtttaatcctgtaatcagcaaatcagtcataacattgatactgtcagaatgtgatgctttcggtgttaggtcttgaaaagctaagatgccacccattgatcgcataagacgttggtaaacagaatctgttagctgagatagcacgacacttttcatggattgttgatcatatgtatatactgaaattggtagttcgccttgtttataaaatgccttggtcatacctttatcaaagataaagtagccgtgaagtttctgctgttttagcaaagtatgtgcttgcttatcatcatatgctttaatgctcacatttttacctaggttactccctttaccaatagagtttaagattaatttcgtttcacttgattgatctttatctacgacacctatattaaaatgattgtcatcttctgttacatgttggatcgtcgttaatgtaataaggagtgccgctaatataaatagtaaatagataatcaaataccactttttcaataaaaaagagtggtagatgcgaaacaaatgtattgttttcatttaaccactcctccaatgataagattgaaaggcaagatgaccttccaatcttatttttatattttagttatttagatgccttttttaaaattgattcaaacattttgccgccatttttttcgatttctttttcaagtttttcacggtcttttgaagatagactattgaaatctttcgcaccactatcatcaaaatcaatatctgctttcaattttgtgctagattttaaaatgaaattaattggttcttcagcatatttgatgccgatatttaacgtagatttctgagtgttattttttacgtcagaatctatattattttcaaaagtgaattcattttcgtcgctatatttatctaatgcgacagtgattttacctttatcttgacgttttgtgccatctactttttcttggttatctaatttgatttttgattcatcatattctgtctttttaccaaattcgtatttatcactgtatttattgtctttttccttagaagatacgcctttaattgtatatttcgcttcagcatacgtgtatttatcttgatcgaaatcaagtgcgtaatctagttttaacttatcgtcttctaaagtattagtacctttgattttagttttgttattttctttgtctgtaatagtaatttctcgttttacaatcgtatgtttttcggtataaattttagattgaattttagcaaattcatcctttttagtttctttgacatcgtcaattgcttttttgatgtctttttcaaagtcttttgtagcaccttgttcttccattaattttttaaggtctttatcctttttagcttcttctaatacagctaatgtgatttttttagtgtcagctctgctaagtgttaacgtgacaggtctaactttgtacttttcaccattaaccttaatttcttcttttttacctttatcaaaattatcgtcatctaatttgtcgacaataagttcggaatatttttcggcaattttgctgtagtcactttgttgtgcttgagcattactaaaaagagtatttaaatttagttgttggtttgtaataccattttcttttgctgtttcttcatcttcacctgtaagttttgaataagttgataataaatcagaattattaacactatatttccctttaaataatggtgattcgaaataatgcttatctttatctgcagctaactggaatttccctaatgcagagtctgctattgttggttcaagattaatcattgatttctcttttttaggatcatgtccatatgacattttaattttcgaagcattaacaacagatttaggaataccaagccccttaacaatttcatctgatgcatctgcgcttaattctaatgaagataaaaatgaattatctttcatcttttcttggaacttcacttcgttttcaaaacggtcattaaaataatctttatacatttttgcagtttgttgttcactttttaagtatgtatttttcggtgtgtttgcaaaaaatgcataaactccccatgcgattccacctattaataataagacaataataataggaattataatttttaactttttagacattttgcttcctcccaattatttatgagttaatcatatcagaacaatacattttattaaatggtttattttaaattttgtttaaattaatagaattttagttataataatgtttaataagttattgaaaatctaataaactacaaaaaatagtttgattacataatgattcttgaaaatgtcggttaactttaaggtgacaagttattgcaattttgaaggtagacatcatattttataatcgaataacatacaaaataaagcgaccaattttgcagtattacgaattgtaatctgcgaactggtcgctttttattgatgtcatgattaatttaatggatgtaattatatgatgaaacttctgaagcagagatggttcttgatgaaacgatatattcaccaatccaattcatttctgaaattagaatacttccatcaatattaactttctcaacgtaggctacatgaccaaatggaccgtttactgtttgtaaaattgatcctcgtgttgggtgtctatctactttgaagccattgcttgaagcttggcctgcccagtttttagcatctccccaaaatgtactaatcgtgtgtccatctttggcacgtttatcaaagacataccatgtacattgtccagcagtatataagttgttcttacttgtgataagaggctgatcaatgattttaccgttacctaatgctaaaggtttaccgtcagcagtctttgctttgtcattaaattcggcgatttgtaattcgtcatacaattcgtctaaatcgatgcctgtaataagccctttgttatcttttgagaaagcgttatttaattcatcgtcattgtcttcgacattcggtattgctggtgtcaaaggattgctaggtgacgtttgaggcggtgtgtgtgaatcaattgcgtcattaatgtgcgtatactgaccacttaatgaagaatagtactgattgttgttaagatcacgttgatttgcgtgttgatgattgttgtttgtacgtgactgattttgatgattgttgtttggcgcgttgtttttgtcataagtataagtatacgcgccggtgtctttattcactttgaactgtgcgtttgggtgtgctttctttgcttcttctaatgttttgctatcattcgtgtatgcttgagccgagttaggcgacatactaaataaagtaagagttgtcatcgtcagtaaaattgttttcttcataataaccatttaatcctttatgtatttaatttaattttagtatacacatttatattacaaaaatgaatggttaattaaaaatatatgggtatattcaatatatttatttaaaaaaagctaaaaatacttaaaaaactatatacatatactaataatttatatattatttgagtaaggagcactttttcaaaaaatagtgtccctaaaaagttttgataaacttaaaatattcaggaggtttctagttatggcaatgattaagatgagtccagaggaaatcagagcaaaatcgcaatcttacgggcaaggttcagaccaaatccgtcaaattttatctgatttaacacgtgcacaaggtgaaattgcagcgaactgggaaggtcaagctttcagccgtttcgaagagcaattccaacaacttagtcctaaagtagaaaaatttgcacaattattagaagaaattaaacaacaattgaatagcactgctgatgccgttcaagagcaagaccaacaactttctaataatttcggtttgcaataagcattctgaaattggcaaagtcacattttctaatgtggctttgcttatcattttttaagaaaacaactgaaaggaaataagcatgaaaaagaaaaattggatttatgcattaattgtcactttaattattataattgccatagttagtatgatattttttgttcaaacaaaatatggagatcaatcagaaaaaggatcccaaagtgtaagtaataaaaataataaaatacatatcgcaattgttaacgaggatcaaccaacgacatataatggtaaaaaggttgagctgggtcaagcatttattaaaaggttagcaaatgagaaaaactataaatttgaaacagtaacaagaaacgttgctgagtctggtttgaaaaatggcggataccaagtcatgattgttatcccagaaaacttttcaaaattggcaatgcaattagacgctaaaacaccatcgaaaatatcactacagtataaaacagctgtaggacaaaaagaagaagtagctaaaaatacagaaaaagttgtaagtaatgtacttaacgactttaacaaaaacttagtcgaaatttatttaacaagcatcattgataatttacataatgcacaaaaaaatgttggcgctattatgacgcgtgaacatggtgtgaatagtaaattctcgaattacttattaaatccaattaacgacttcccggaattatttacagatacgcttgtaaattcaatttctgcaaacaaagatattacaaaatggttccaaacatacaataaatcattattgagtgcgaattcagatacgttcagagtgaacacagattataatgtttcgactttaattgaaaaacaaaattcattatttgacgagcacaatacagcgatggataaaatgttacaagattataaatcgcaaaaagatagcgtggaacttgataactatatcaatgcattaaaacagatggacagccaaattgatcaacaatcaagtatgcaagatacaggtaaagaagaatataaacaaactgttaaagaaaacttagataaattaagagaaatcattcaatcacaagagtcaccattttcaaaaggtatgattgaagactatcgtaagcaattaacagaatcactacaagatgagcttgcaaataacaaagacttacaagatgcgctaaatagcattaagatgaacaatgctcaattcgctgaaaacttagagaaacaacttcatgatgatattgtcaaagaacctgatacagatacaacatttatctataacatgtctaaacaagactttatagctgcaggcttaaatgaggatgaagctaataaatacgaagcaattgtcaaagaagcaaaacgctataaaaacgaatataatttgaagaaaccgttagcagaacacattaatttaacagattacgataaccaagttgcacaagacacaagtagtttgattaatgatggtgtgaaagtgcaacgtactgaaacgattaaaagtaatgatattaatcaattaactgttgcaacagatcctcattttaattttgaaggcgacattaaaattaatggtaaaaaatatgacattaaggatcaaagtgttcaactcgatacatctaacaaggaatataaagttgaagtcaatggcgttgctaaattgaaaaaggatgctgagaaagatttcttaaaagataaaacaatgcatttacaattgttatttggacaagcaaatcgtcaagatgaaccaaatgataagaaagcaacgagtgttgtggacgtaacattgaatcataaccttgatggtcgcttatcgaaagatgcattaagccagcaattgagtgcattatctaggtttgatgcacattataaaatgtacacagatacaaaaggcagagaagataaaccattcgacaacaaacgtttaattgatatgatggttgaccaagttatcaatgacatggaaagcttcaaagacgataaagtagctgtgttacatcaaattgattcaatggaagaaaactcagacaaactgattgatgacattttaaataacaaaaagaatacaaccaaaaataaagaagatatttctaagctgattgatcagttagaaaacgttaaaaagacatttgctgaagagccacaagaaccaaaaattgataaaggcaaaaatgatgaatttaatacgatgtcttcaaatttagataaagaaattagtagaatttctgaaaagagtacgcaattgctatcagatacacaagaatcaaaatcaattgcagattctgttagtggacaattaaatcaattagataataacgtgaataagctacatgcgacaggtcgtgcattaggtgtaagagctaacgacttgaatcgtcaaatgactaaaaacgataaagaaaatgatttattcgctaaagagtttaaaaaagtattacaaaattctaaagatggcgacagacaaaaccaagcattaaaagcatttatgagtaatccggttcaaaagaaaaacttagaaaatgttttagctaataatggtaatacagacgtgatttcaccgacattattcgtattattgatgtatttactatcaatgattacagcatatattttctatagttatgaacgtgccaaaggacaaatgaatttcattaaagatgattatagtagtaaaaaccatctttggaataatgtcattacgtcaggtgttattggtacaactggtttggtagaaggattaattgtaggtttaattgcaatgaataagttccatgtattagctggctatagagcgaaattcatcttaatggtgattttaactatgatggtcttcgtacttattaatacgtatttactaagacaggtaaaatctatcggtatgttcttaatgattgctgcattgggtctatactttgtagctatgaataatttgaaagcagctggacaaggtgtgactaataaaatttcaccattgtcttatatcgataacatgttcttcaattatttaaatgcagagcatcctataggcttggcgctagtaatattaacagtacttgtgattattggctttgtactgaacatgtttataaaacactttaagaaagagagattaatctaatgttgatgaatagcgtgattgctttaacttttttaacagcatctagcaataatggcggacttaatattgatgtgcaacaagaagaggaaaagcgaatcaataatgatttaaatcaatatgatacaacgctatttaataaagacagcaaagcggttaatgatgcgattgctaagcagaaaaaagaacgacaacaacaaataaaaaatgatatgtttcaaaatcaagcgagtcactcgactcgcttgaatgaaactaaaaaagtgttattttccaaatctaacttagaaaagacttcggagagtgataaaagcccctatattcaaaacaagcaggagaaaaaaatattcccgtacattttgatgtctgtaggggcttttttgactttaggatttgtcattttttcaattcataaagggagacgaacgaaaaatgaatcagcacgtaaaagtaacatttgattttactaattataattacggcacatatgacttagcagtaccagcatatttaccgataaaaaacttaatagctttagtattggatagtttggacatttcaatatttgatgtcaatacacaaattaaagtgatgacgaaaggtcaattacttgttgaaaatgatcgactcattgattatcaaatcgctgatggagatattttgaagttactataggaggaaaaatagatggttaaaaatcataaccctaaaaatgaaatgcaagatatgttaacgcctttagatgctgaagaagcagctaaaacaaaattacgcttagatatgagagagattcctaagtcttcaattaaaccagaacattttcatttaatgtacttattagaacaacattctccatattttatagatgctgaattaactgaactacgtgacagtttccaaatacattatgacattaatgacaatcatacaccttttgataatattaaatcatttactaaaaatgaaaaattacgttacttactcaatatcaaaaatttagaagaagtaaatcgtacacgctacacatttgtgttggcaccagatgaattatttttcacaagagatggattaccaattgctaaaacaagaggtttacaaaatgttgttgatccattaccggtgtcagaagctgaatttttaacaagatataaagcactggttatctgtgcattcaatgagaaacaatcatttgatgctttagttgaaggaaacttagaactacataaaggaacgccatttgaaactaaagttattgaagcggcaactttagatttactaacggcatttttagatgaacagtatcagaaacaagaacaagattatagtcaaaattatgcatatgtacgtaaagtaggacataccgtttttaaatgggttgctatcggtatgacaacgttaagtgttttattaattgcattcttagcctttttatatttttcagtaatgaagcataatgagcgcattgaaaaaggataccaagcatttgtaaaggatgattatacgcaagtactaaatacgtatgatgatttagatggtaaaaaattagataaagaggcactttacatttatgccaaaagttatatccaaacaaataaacaaggtttagaaaaagataagaaagaaaatttacttaataacgtgacaccaaattcaaataaagactacttattatattggatggaattaggacaaggacatcttgatgaagcgattaatatagccacttatttagatgataacgatattacaaagttagcgttgattaataaattaaatgagattaaaaataacggagatttatcgaatgataaacgttctgaagaaacgaaaaagtataacgataaattgcaagatattttagacaaagaaaaacaagttaaagatgaaaaagcgaaatctgaagaagagaaagcaaaagcgaaagatgagaaattaaagcaacaagaagagaacgaaaagaaacaaaaagaacaagcacaaaaagataaagaaaaacgccaagaagctgaaagaaaaaaatagtataggactgaggcaaagacaatgcataaattgattataaaatataacaaacaattgaagatgctcaatttgcgagatggtaagacatatactattagcgaagacgagcgtgcagatattacgttgaaatcgttaggcgaagtcattcatttagaacaaaataatcaaggtacttggcaagcgaatcatacttctattaataaggtgcttgttagaaaaggtgaccttgatgacattacattacagctttatacagaagctgattatgcatcatttgcgtatccttcaattcaagatacgatgacaattggaccaaatgcgtatgatgatatggttattcaaagcttgatgaatgccatcattattaaagattttcaatcaatacaagaatcacaatacgtacgcattgtgcacgataaaaatacagatgtgtatattaactatgaactacaagagcaactaacgaacaaagcttacattggtgatcatatttatgttgaagggatatggctcgaagtacaagctgatggtttaaatgtattgagtcagaatacagtggcatcgtcattaattcgcttaacacaagagatgccacatgcacaggcagatgattacaatacgtaccatcgttcgccaaggattattcaccgtgaaccgaccgatgatattaagattgaaagaccaccacagccaatacagaagaacaatacagtgatatggcgttccattataccgccattagtaatgattgctttaactgttgtcatctttttagtgagaccaattggtatttatattttaatgatgattggtatgagtacagtaacgatagtatttggtattacaacgtatttctctgaaaagaaaaagtataacaaagatgttgaaaaacgagagaaagattacaaagcttatttggataataaatctaaagaaattaataaagcgattaaagcacaacgttttagtttgaattaccattatccaacggttgctgaaattaaagatatcgttgaaacgaaaacaccaagaatatatgaaaaaacatcgcatcatcacgatttcttacattataagttaggtattgcgaatgtagaaaagtcattcaaattagattaccaagaagaagaatttaatcaacgtcgtgatgaactattcgacgatgctaaagaattgtatgaattttacacagatgtagaacaagcaccattaatcaatgatttaaatcatgggccaattgcatatattggtgcacgacatctcattttagaagaattggagaaaatgctaatccaattgtcaacattccatagttatcatgatttagagtttctatttgtgacacgtgaagatgaagttgaaacattgaaatgggcacgttggttgccacatatgacattgagaggtcaaaacattagagggtttgtttacaatcaacgaacacgtgaccaaattttaacgtcaatttatagcatgattaaagaacgtatccaagctgtgcgtgaacgcagcagaagtaatgagcaaattatttttacaccgcaattagtgtttgtcattacagatatgtcattaattattgatcatgtcattttagaatatgtaaaccaagatttatcagaatatggtatttcattaatctttgttgaagatgtgattgaaagtttgccagagcatgtagataccattattgatatcaagtctcgtactgaaggcgaactgattacgaaagaaaaagaattagttcaattgaaatttacacctgaaaatattgataacgtcgataaagaatatatcgcgcgacgtttggcgaatttgatacacgtcgaacatttgaaaaatgcaattcctgatagtattacatttttagagatgtataacgtgaaagaagtagatcagcttgatgtggttaatcgatggagacaaaacgaaacatacaaaacgatggcagtacctttaggtgtaagaggtaaagatgatattttatcattgaacttacatgaaaaagcacacgggccacatggtttagttgctggtaccactggttcagggaaatctgagattatccaatcatacattttatctttagctattaattttcaccctcatgaagttgcattcctattgattgactataaaggtgggggtatggcgaacttatttaaagatttagtccatttagttggtacgattacaaacttagatggcgatgaagcgatgcgtgccttaacatcaatcaaagccgaattgagaaaacgtcaacgtttattcggagagcatgatgttaaccatattaatcaataccataagttatttaaagaaggtattgcgacagaaccaatgccacatttattcattatttccgatgagtttgccgaattaaaatcagaacaacctgattttatgaaagaacttgtatcaacggcacgtattggacgttcgttaggtattcatttaatacttgcgacacaaaaaccatcgggtgttgttgatgaccaaatttggtctaactctaaatttaaattggcattaaaagtacaagatagacaagacagtaatgaaattttaaaaacaccagatgcagcagacattacattaccaggtcgtgcgtatttacaagttggtaataatgaaatttatgaattgttccaatctgcatggagtggagcaacatatgacatcgaaggcgataaattagaagttgaagataagacgatttacatgattaatgattatggtcaacttcaagcaatcaacaaagacttgagtggacttgaagatgaagaaacgaaagaaaatcaaactgagttagaagcggttatagatcatatagaatctattacaacacgattagaaattgaagaagttaagcgtccatggttaccaccattaccagaaaatgtatatcaagaagatttagtagaaacagatttcagaaaattatggtcagacgatgcaaaagaagtggaattaacattaggacttaaagacgtaccagaagagcaatatcaagggccgatggtattgcaattgaaaaaagctggtcacatcgcgttaatcggaagtccaggatatggtagaacaacgttcttacacaacattattttcgatgttgcaagacaccatcgtcctgatcaagcacacatgtacttgtttgatttcggtaccaatggtttgatgccagtcacagacataccacatgtcgctgattactttacagtagatcaagaagacaagattgcgaaggcgatacgtatattcaatgatgaaatcgatcgccgtaagaagattttaagtcagtatcgtgtcactagtatttctgaatatcgaaaattaactggtgaaacaattccgcatgtctttattcttattgataactttgacgcagtaaaagattcacctttccaagaagtttttgaaaatatgatgattaaaatgacacgtgaagggctagcattagacatgcaagtaaccttaactgcctcaagagctaacgctatgaaaacaccaatgtacattaatatgaaaacgcgtatcgccatgtttttatatgataaatcagaggtgtcgaacgtagtaggacagcaaaaatttgcggttaaagatgtagtaggtcgagcattattaagtagcgatgacaacgtatcattccatattggccaaccatttaaacatgatgagaccaaatcatataatgatcaaattaatgatgaagtatcggcgatgacagaattttataaaggtgaaacaccaagtgatattcctatgatgccagatgaaattaaatatgaagattacagagaatcattaagcttaccggatatagttgcaaatggtgctttaccaattggattagattatgaaggtgttacactacaaaaaattaaattaactgaaccagcaatgatttcatcagaaaatccgagagaaattgcgcatattgccgaaattatgatgaaagaaattgacatattaaatgaaaaatatgcgatttgtatcgcagactcaagtggagagtttaaagcttatagacatcaagtggctaactttgccgaagaaagagaagacattgaagcgattcatcaactaatgattgaagacttaaaacaaagagaaatggacggtccgtttgaaaaagattcactttacattatcaatgattttaaaacatttattgattgcacgtatattccggaagatgatgttaaaaaacttattacaaaaggaccagaacttggcttgaacattttatttgtcggcattcataaagaattaatagatgcttatgataaacagattgatgttgcacgtaaaatgattaaccaatttagtataggtattcgtatttcagaccaacaattctttaaatttagatttattcaacgagaacctgttattaaagaaaatgaagcatatatggtcgcaaaccaagcttatcaaaagattagatggtttaaatagcaatgaattaaataggagggaggtatgttatgaattttaatgatattgaaacaatggttaagtcgaaatttaaagatattaaaaagcatgctgaagagattgcgcatgaaattgaagttcgttctggatatttaagaaaagctgaacaatataagcgattagaatttaatttgagttttgcactagatgatattgaaagcacagcaaaggacgtacaaactgcaaaaactagtgctaataaggacagtgtaactgttaaaggaaaagcgcccaatacgttatatatcgaaaaaagaaatttgatgaaacaaaagcttgaaatgttgggtgaagatatcgataaaaataaagaatccctccaaaaagctaaggaaattgctggagaaaaggcaagtgaatattttaataaagcaatgaattaatattgaggtgaagatatgggtggatataaaggtattaaagcagatggtggcaaggttgatcaagcaaaacaattagcggcaaaaacagctaaagatattgaagcatgtcaaaagcaaacccaacagctcgctgagtatatcgaaggtagtgattgggaaggacagttcgccaataaggtgaaagatgtgttacttattatggcaaagtttcaagaagaattagtacaaccgatggctgaccatcaaaaagcaattgataacttaagtcaaaatctagcgaaatacgatacattatcaattaagcaagggcttgatagggtgaacccatgatgaaagatgttaagcgaatagattatttttcttacgaagaattaacaattttaggtggtagtaaattacctctcgtaaattttgaattgtttgatccatcaaattttgaagaagctaaagctgctttaattgaaaaggaattagtaacagagaatgacaagttaactgatgcaggttttaaagtggctacattagtcagagagtatattagcgcaattgtaaatattcgaattaatgatatgtattttgcaccatttagctatgaaaaagatgaatatattttgttaagccggtttaaaaataatggatttcaaatacgaattataaataaagacattgcatggtggtcgattgtacaatcatatcctttattgatgagacaagaaaagtctaatgattgggactttaaacaaattgacgatgaaacattggagaacttaaataatgaaagtatcgatacgattgggcgtgtgttagaaattgaaatatacaatcatcaaggtgaccctcaacaaagtttatataacatttatgaacaaaatgatttgctactcattcgatacccattaaaagataaagtgctgaatgttcatattggtgtcattaatacatttatacgagaattatttggattcgatactgatgaaaatcatattaataaagcagaggagtaatgacgttgagtgggaaaattagtgttaaagctgaaacgattgcacatgttgtaaaagaattagaaagcattagtcaaaagtatgatgaaatagctcaaaactttgggaaaatagcgcaattaaattactacagtagtgaaaaagctgcacattctatggaaaatggctatagtagtgctgcaacagtcattagtggtctcaaaggtccattgagtacactcggtggtggcgtcatgaattcagcacaaaagttctttgaagcagatgaacattggggtacggaatttgccaagctttactataatattgaaggataggtgcatgacatgacaaaagatattgaatatctaacagctgattatgataatgaaaagtcatctatccaaagtgtaatagatgcaatagagggtcaagacttcttagatgtagatacaacaatggatgatgcggcaagcgatgtcagttctttagacgaagatggcgcaatatcattaacaagtagtgtagtaggtccacaaggatctaagttaatggggtattatcaaaatgagttatatgattatgcatctcaattagattcgaaaatgaaagaaattattgacacgccatttatagaagatatagataaagcattcaaaggtataacgaatgttaaattggaaaatatactaattaaaaatggtggtggacatggtagagatacctatggggcttctgggaaaattgcaaagggagatgccaagaaaagtgacagcgatgtttatagcatcgatgaaatattaaaatcggatcaagaatttgtaaaagtaattgatcagcattacaaagaaatgaaaaaagaagataagaaattatctaagagtgattttgaaaaaatgatgactcagggcgcttcttgtgattacatgacagtagctgaagcggaagagctagaggagcaaaagaaaaaagaagaagctatagagattgcagcactagctggtatggtagtgttatcttgtattaatcctgttgctggagcagtagctattggtgcctattccgcctattcagcagcaaatgcagccacaggaaaaaatattgtaactggaagaaagctatctaaagaagaacgaatcatggaaggactttcgcttattccattgccaggtatgggtttcctcaaaggtgctgggaaaagtttaatgaaattaggcttcaaaggcggagaaaaatttgcagttaaaacaggattgcaaaagacaatgcaacaagcagttagtcgtatttcacctaaaatgggaatgatgaaaaacagtgtgttgaatcaatctcgtaactttgctcaaaatactcatgttggacaaatgctgagtaacatgcgtggtcaagcaactcatactgttcaacaaagtagaaattggattggacaacaagcacaaaatgtcaaacgaatagtgaataatggacttgataaagaaatagcacatccatttaaacaacaacttgcaccagcgggaatgggtggtataaaatttgctgaaacaactactttgagaaacatgggtcaaaacataaaacgtgctgttacaccacaaaatcacgtgacacatggtccaaaagatagtatggtgagaagtgaaggcaaacatagtataagtagccatgaaatgaattcatcaaagtatgttgaatcaccaaactacaccaaggttgaattcggagaacactatgcgagacttagacctaagaaactaaaagcaaatatagaatatacaacaccaactggtcacatatatcggaccgatcataaagggcgcataaaagaagtttatgtagacaatctttctctaaaagatggcggtcgtaataaccatgcacaaagaactgtggggggagaggatagattaccagacgatgatggaggtcacttaatcgctagaatgtttggtgggtcaaaagacatagataaccttgtagcacaaagtaaatatatcaaccgttcatttaaggaaaatggtgattggtacaagttggaaaaactatgggaaaaggcaatcaagtctggaaaatcaatagaaaatattaaaatagaagttaaatatagtggtaatagtaaaagaccaaccgaatttttggttgaatattatgtaaacaataaagaatttgtacaacatgtaaaaaatatataggagcgataatatgactttcgaagaaaaattaagtcaaatgtacaacgagattgcgaataagattagcagcatgataccagtagagtgggaaaaagtatatgcaatggcttatgtaaatgaaagaagtggagaagtgttttacaattatactgaaccaagaagtgatgaattattttactatacgagcgtgttaaataaatataatataccaagatcagaatttatggactcagtatatgaattatataagcaatttgataatttaagagaattgtttatagaagaaggactcgagccatggacatcatgtgaatttgattttacaagagagggtaaattgaaagtatcatttgattatatagattggataaatacagagtttgatcaattaggccgtgaaaattattatatgtacaaaaaatttggggttataccagaaatggaatatgaaatggaggaggttaaacaaatcgagcaatatattaaagagcaagaagaatagacaatcttaatgtgagactaaacaataaagctttgtttagtctttttagcggttaagtaaaaagcaatagagaatataaagttgatactcatcaaataataatataaagataattttaggttttcatacttttaatcgacaagaatctaagtacttatagctttaaatacgtaatatgctattacaaaatcaatgtataggagatagatatgactactaaagaaaatattgatactcttcgaaagccaggtgcacaagccttaagtttaatatcattgtttttgatacttttttcatgtctgactttcttttttggtttagattatgaaaggttttctaattatttaaagataacgacaattatagaattaataattatcataattagtttacttcaatggattagatttatagatttcgaaaaagaaagtacacagaaatataaaaaaatatatgctcgatttttagttattataaatgtgttaactactatcactgtagtatttgcactgtgtaacctttattattttgcagctgtacaaaatcattatgatttatttaattattggttgatgggtacgatttcaatcataactagctatttgttattaataattggcggaatgttcacgttattaaaattgcctaaagtaacaaaacgttggggtggtaaaactaaaacacattttggtttattattaactgcgttgagttcatttatatatattgaaaaaattatcgaatatatattggttcctaatgtcgtagaatccaagtttataattattgtaagtatgttggttatcgccggagcacaatttgtggcatttcaatttattatgcaatacagtagattctatatttttgaattaaacacagaagatgatgactaaatgattttgtaaattctttaaagtatacttaaataagaaaatcaacttcaacgtatatcgccatattattttatactcaatgatgtaaatgcatttaagtggattgatattaaagtaaaagttatggaatattgaggtgcgaatatggagttcttattattaattgtcgtaaccggactgtattatattatatatttaactgctgtgatgtattctgaaaaaatagtagtattgcctataatcatctatgccattgtgtttgtagtaattggtatcacttatatttttataggtgacagctatgatcagttaacaaatttcaatgtgattttgtatatggggagtttgttttatgcatggatggcttttagaaatctttggaacagaccactattactaaaatataagaacattacagatagttcaagtggaatagttaataaatctgaatacaattcagttgaaagcttacgtataaacattgaaatagctaagtataaagggattatttctttgatagtagctatagtactaacggtattaatgacattaaagtcaacacctcaaatcactgcagaaacacgtgacttaagtatctcatttttcatactcagcttatttatcattataatatttgcagtttgggatttgattattagagttagaaagggaacgtttgcttttgttgtaataaggccaatattatttagttgctggttatttattttgaatatgattttatcaagattattataatgataagaagttgaataaattgtaatgtgaaaaatcattgagaatttcaattattgtaacaatagtttcagttattttagtttcattagtttatttaagtttaaaatgagtaatattattttgaagaagcattaatccacgtagaagtgttgtttaatgctttttatttaacggtaatgaaaatataggggcgataacatgactttcgaagaaaaactaagtgaaatgtacaataaaattgcaaatgagattagtgggatgatacctgtagagtgggaaaaggtatatgcaatggcatatatagatgaagaaggaggcgaagtgttctactattacacagaacctggaagcaatgaattatactactatactagtgtattaaataaatatgatatatcggaatcagaatttatggactcagagtatgagttgtataaacaatttcaaaagttaagaaatatatttaaaaaagaaggacatgaaccatggacatcatgcgaatttgattttacaagagaaggtaaattaaaagtttcatttgattatatagattggataaattcagaatttggtcaaataggtcgacaaaattactataagtatagaaaatttggaattttaccagaaacggaatatgaaattaataaagttaaagaagtagagaagtatattaaagagcaagaagaagctgaacaataggggagataacatgacttttgaggaaaaaataaatgaaatgtataatgagattgcgaatgagattagcagtatgatacctgtagagtgggagaagtatatgcaatggcatatattgatgaagaatctggagaagtgttttacaattatactgaaccaagaagtgatgaattattttactatacaagtgtgataaaggagtataatatattgaaatcaagctttatggattcagtatatgagttgcatgatcaatttgaggaactaagagaaatatttatagaagaaggtcttgaaccatggacatcatgcgaattcgactttacaagcgagggtaaattaaacgtatcatttgattatatagattggataaatacagagtttgatcaattaggccgtgaaaattattatatgtacaaaaaatttggggttataccagaaatggaatatgaaatggaggaggttaaacaaatcgagcaatatattaaagagcaagaagaatagacaatcttaatgtgagactaaacaataaagctttgtttagtcatttttagtggttaatgaaaaatcaatagggaatataaagttgatgctcatcaaataataatataaagataattttaggttttttgtagatgaaaatctaagtacttataactttaaatacttaatatgctattacaaaatcaatgtataggagataggtaaatatggctactaaggaaaatatagacattcttcgaaagccaggtgcacaagccttaagtttagcatcattatttatgatacttttttcatgtctaactttcttttttggtttagattatgaaaggtttccaaattatttaaagataacgacaattatagaattaataattatcataattagtttacttcaatggattagatttatagatttcgaaaaggaaagcgcacagaaatataaaaaaatatatgcccgatttttagttgttataaatgtgctaactactatcactgcagtatttgcaacatgtaatctttactattttgttgctttacaaaatcattatgacctattcaattattggttgatgggcacgatttcaatcataattagctatttgttattagtaattggcggaatgttcacgttattaaaattacctaaagtaacaaaacgttggggtggtaaaactaaaacccattttggtttattattaactgcgttgagcgcattcatatatattgaaagaattatcgaatatatattggttcctaatgtagtagaatccaagtttgtcataatggtaagtatcattattattgtttgtacacaatttgcagcctttcaatttattatgcaatacagtagattctatatttttgaattaaacactgaagatgatgactaaataattttataaattactattggagtatacttatataaaaaatcaacttcaacacattattttactcaatgatgtgaaagaatttgagtggattgatattaatgggatttgattattagaattagaaaaggaacgtttgcttttgttgtaataaatctaatatttttcagttgttggttatttattctgaatatgattttatcaagattattataattgtattacatataggtgttggtaaatttttatttaagaaatggtaaaaagtatatactattaatatattttttactataattataaatagttaaataaattgaaagacaaaataatgagcaggagttttagggttgttatttacaaataatataatactgaaaaagactcaaaattatttagaattccagttatcgtaacaatagttgcagttattttagttccattagtgaatttaggtatgaaatgagtaatattaatttgaagaagcattaagcgacgtagaggtgttgtttagtgctttttatttaacggaaatgaaaccaatatctattttgaaaatataggggtgttaacatgactttcgaggaaaagttaagtcaaatgtataatgagattgcaaatgagattagcagtatgataccggtagagtgggaaaaagtatatacaatggcttatatagatgatggtggaggtgaagtattctttaattatactaaaccaggaagtgaagatttgaattattacaccgatatacctaaggagtataatgtttctgtgcaagtatttgatgatttatggatggatttatatgatttgtttgaggagttaagagaattgtttaaagaagaatatttagaaccatggacatcatgtgaatttgactttacaagcgaaggtaaattaaaagtttcatttgattatatagattggataaatacagagtttgatcaattaggccgtgaaaattattatatgtataaaaaatttggggttataccagaaatggaatacgaaatggaagaaattaaagaaatcgagcaatatattaaagagcaagatgaagctgaacaataggggagataacatgactttcgaagaaaaattaagtgaaatgtacaacaagattgcgaatgagattagtggaatgataccagtagagtgggaaaaagtatatacaattgcttatgtagatgatcaaggtggagaagtcgtttttaattatactaaaccaggtagtgatgaattgaattattacacatatatccctagagagtataatgtctctgaaaaagtattttatgatttgtggacggatttatatagattgtttaagaagttaagagatttatttaaagaagatttagaaccatggacatcatgtgaatttgattttacaagtgaaggtaaattaaacgtatcttttgattatattgattgggtgaattcagaatttggaccaatgggaagagaagattattacatgtataaaaagtttggaatttggcctgaaaaagaatatgcaataaatagggttaaaaaaatagaagattatattaaagaacaagaagaaactgaactataggggagataatatgactttcgaagaaaaactaagtcaaatgtataacgagattgcgaatgagattagtgggatgataccagtagaatgggagcaagtatttacaatagcctatgtaactgatcaagctggagaggtcgtttttaattatactaaaccaaacagcgatgaattgaattattacacatatatccctagagagtataatgtctctgaaaaagtattttatgatttgtggacggatttatatagattgtttaagaagttaagaaacgcatttaaagaagaagatttagaaccatggatatcatgcgaatttgactttacaagagagggtaatttgaaagtatcgtttgattatatagattggataaaattaggttttggtccatcaggaaaggaaaactactatatgtataaaaagtttggtgttttaccagaaacggaatatgaaattaataaagttaaagaaatcgagcaatatattaaagagcaagatgaaactgaactataggggagataacatgactttcgaagaaaaactaagtcaaatgtacaataaaattgcaaatgaaatcagtggaatgataccagtagaatgggaaaaagtatatacaattgcctacgtagatgatgaaggtggagaggttgtttttaattatactaaaccaggaagtgaagatttgaattattattcagatattcctaaagattgcaatgtatcaaaagatatttttaagaattcatggtttaaagtttatcgaatgtttgatgagttaagagaaacttttaaaaaagaagatttagaaccgtggacatcatgtgaatttgactttacaagagagggaaatttaaacgtatctttcaactatatagattggattaaattaggttttggcccatcaggaaaggaaaactactatatgtacaaaaaatttggtattttaccagaaacggaatatgaaattaataaagttaaagaagtagagaagtatgttaaagagcaagagtagcagacatgttataaaaggttgtgcaaaaccaacctcgttatacgtttgattcaaagaagaaggtaaatgataagattatttgcaacttaaaaagtccaattagcttatcggtatccatacatcatggataaatgagttcaactaattaacaaatcacgatataaatttaaaattgtcattaattgaaaaggttattgtagtgtattttataaagttgatgcacatctacttattttttaaaacttatatcaaaaaatatgagaaaagtatatactattaaaatgttttttactataattataaatagttaaatatttggagattaaataaatatataggaggcaatttttagagatacatagcaatgtaaaggtatcaaatagttattgcataatttattatgatgacataattttcagtaaatagttgtaaattaacactgaaatagatgtttatattaagaagactttaatatcataattaatcaaaatcttgcgtcaaacatttaaacgaattttaagtttataacaattggttaaacattgttcaaacattacaatgataaagcatattatcagtattgtagtgtgtggaaaatgacagccatctaaggagaaaaatgatgaaaagaatattggtagtatttttaatgttagcaattgtattggcaggttgttctaataaaggtgaaaagtatcaaaaagatattgataaagtgtacaaagaacagaatcaaatgaataaaatcgcctcgaaagtacaaaacactattaaaacagacattaaacaagaagacagtaatacacatgtttataaagatggtaaagtcattgttattggtattcaattgtataaagatcgtgaaaaaatgtattatttcgcatatgaaataaaagatggtaaggcagaaatcaatagagaaatagatccaattaagtatatgaaagaccataaagcagattatgaagatgaaaatgtagaagtggaaaaagattaacgtatgctttctttaaaacttttaaccagtttcaaaaagtaaatgagctttagcgacaataatttttaaaataaacacgatataaatttaaacatttatatataagaacacaaacgtaagtttgtaaataataataaaggagtaagacaatggaaaaatcgatcaaaataatgacaataataggaattgttgttcagggtttagcaacggtatttagtttactatttatggttttagcagcatcaggtgtaatgactacagatgtgtcaacaacagttaatggtgaggttgacccagttgatgcagaaacagcagcagcaattttcactgtattattcttattcctatttatatttggaatcatttcaattattttaggtgcaatcggtatgtttaaagcatctaaaaacaaaaaaatgagtggtatattgttgattattggagctgtaataagtggtaacataattacatttgctttatggttagtcagtggtattaaactacttactaataacaagcctaaagatgaaataagcgacttatcataaacatcgtatattgaaatttcaagatttcttaagtaattatatttctgttagtttttaacaaattaaccaattaaataaagtgctctcttagaagtagattttcagtcaataactgcttttaagagagcattttgtatttgataatgctcatagcatcggacaaaaaccattgacgaactttaaaaaaatacgttagacaatgcacttctaaatattaaaggcatcgactaacgcattgttcaaataaagttaattatttttataaaattgatgatgatcattcaagtaagcatagaataaacctataatgagtccgcctctgatatagttaccgataaaagcggcagcaatatttgaaatagcaggaatgaagtgcaatgtatcaacttgataaattaagccacccataaacaagcaactgttgtaaacgacatgttcataacccataaaggcgaatatggtaacaccgaacatcatgacaaacatttttgcaagtacatcgtcaatttgcatggcgataactaatgaaatattaataaagaagttggcgaatatcgctttcattaatatacttacaaatccagtagacaacgttttatgttctataactgctgataattgatttaacatatctggcgtcattacatttgaaaaacgcatgaaactaaataaaatagcagcacctaaaatatttcctgcaaagcataataaaaatattttcaatactctagttggtttaattactttataatacagtcctacagtaaagtacatgaagttactggttagtagttcggagtttgtaaataaaatgagtactaacgcaaagctgaatgtaatggcgctggccatattcactatacctggtggtaaatctggttcgtgtgttgctttaactgatagcacgaagaccgtaataataccgataataaatcctgccatcatagcgcgtaatagataacgttttaaataaacgctttgtaatatatctttcgttcttatcgtttcgactacgttatttacccagtcgtccccataaaatattttatcccatttaatatgtttctccttcacaatgacatcctcacttttcatttgttaatcagagtatactatgaatcgccttatttgtgaataatttcacaaaattaattttaaaaactaatatttttgaataacagctaggattttttaacaaatcatttattttaaaataattaatcgccagttagtatcaatgaataaatacagattttcatacaaaaaacctagtaatgatacgacgatcattactaggagattatgcgtctatttagttgtcgcttgtttcggacggcgtataactacatcgatgatgaaacctatgattgccaaaagaatgaatggtacaagccaagctaaatcgatatctgctaaaggtaacatcataaaccatttcaaaataacaccgtgtaataagtcgaaactgtttagtatttgtaaaattgaaataatcaatgtaataacagttgcgagtcgataggcccaactgaatctgaatgtgctaaacatgttagcaaatgatatcagtacaagtgcaatagacacgggatatattaatgtcaacaatggtacagcaatttttaaaatcatttctaaaccaagtgttgtaaataaaaatcctatgatagagaaaacaagtgcgaatattttataagaaaacttaggcacgtgtttcttagtaaatgttgcacaagcgttgacgagtcctatacatgttgttaggcatgcaagaataaccgtcattccaaatacgaggttaccgaacgaaccaaatacgcgtaatgaattgtatgtcaatatatcagtaccatctttaaagtttcctggagctgttgacgcacctacatatgccaacgcaaagtaaatcataccaagtaatatggctgcaataagacctgagaagcagacatattttaaaattttcatgcgatctgtgaggcctttaaacttatagccattgacaatgactacggaaaaagctaacgcagcaacaagatccattgtaaaataaccttccaaactgcctgaaatgaaaggatgtgttatatatttatccttaggtgcacttagtgcagattcagggttgaaaatgacagcaatacttaatagagcgaccatcaatagtaataatggtgttaataatttacctaaattatcaacgattttcgatggatttaaactaatccagtaaacgatagcaaaaaagattgctgcgaatataattaaagtccattggttatgcacaggtaaaatgtgtcttgtaccaatttcgtacgcgacatttgcagcacgtggaataccgtaaaatgctccgatagacatgtaaatcacgacagcaaaaataaacccgaaccatggatgtatacgattgcctacactttcaacaccttcatcataaaatgcaacaacaataacagtaataaaggggagtaatatgcctgtaagagcaaagcctagcataccaatccacatattttgacccgctgtatggccaagcatgggcgggaatattaaatttccggctccaaaaaatagtgaaaataacatgaggcccgaaataataacttgttttttcaatgtaatttccttcctaaaactagatattcataataatttaaaaaatctgaaaaataaaaacgttcttactttatctttaaatgacaatactatgattctattattttataaaaaagattgcaataataacaacttggcgttattggataatgacaattaaagtgtcgtttttatgaattaaaatagttaagagtatagtagaaatatattggaaaggcataatttaaatgaatatttgtatccgtagtgttagatgagtgatgttatttattcataaaatgtgtttatagttgttccgataggctaactggaaattgaacctgtacacataatgattcttggataagcatctaaaaaatatagacgagtgacttggatagaaagggcacaatttattcaagtttatttcatgatgaaaattagcgtagaaatctatagttgttcatccatttaattgtatctgcatgaaatgttcacatatttgttagcttttcaagaaataatattaaatatcttttcatagtatagcaatattaaataaatacatttataattttaactgtattttaaatattaatcatgaggtgataagatgaataaaatttcaaagtatattgcaatagcatcattatcggtagcggttacagtttcagcaccacaaacgacaaattctacagcgtttgccaaaagttctgctgaagttcaacaaacgcaacaagcttctataccagcatcacaaaaggtgaatcttggtaatcaaaatattatggcagtggcttggtatcaaaattcagctgaagcaaaagcattatatttacaaggttataacagtgcgaaagttcaactagataaagagattaaaaagaataaaggtaaacataagttagctattgctttggatttagatgaaacagttttagataattctccatatcaaggctatgcatcaatacataataaacctttcccagaaggttggcatgaatgggtacaagctgctaaagctaaacctgtctatggcgcaaaagaattcttgaaatatgctgacaaaaaaggtgtcgatatctactatatttctgatagagataaagaaaaagatttaaaggcaacacaaaagaacttaaaacaacaaggtatccctcaagctaagaagagtcatattttactaaaaggtaaagatgataagagtaaagaatcacgcagacaaatagttcaaaaggatcataaacttgtcatgctatttggagataatttattagactttacagatccaaaagaagctacagctgaatctcgtgaagcattaattgaaaaacataaagacgatttcggtaagaaatatatcattttccctaacccaatgtatggtagttgggaagctacaatttacaacaataactataaagcaagtgacaaagcaaaagataaattacgtaaaaatgctattaagcaattcgatcctaaaacaggcgaaattaaataatatatgaattggacgtctacatgtacttaaaggtatatgtaggcgtttttaaattgatccgtaattttaaatgtaccgtacacaaataatagacaattaattgcattttccataaatttgcttttaatataaaaagttcgggtataatgaaggataagtgtatgtataacattacagagcgcaacacgacgtacgtgcatctaagaatataaacaatgtttaaatcatagtagtagggagagaaatgcatgtttttagcttggaatgaaatacggcgcaacaaattgaagtttggactaattattggtgtgttaacgatgattagttacttgctatttttattatctggattggcgaatggtcttatcaatatgaataaagaaggtattgataagtggcaagcagatgccattgttctaaataaagatgccaatcaaactgtgcaacaatctgtttttaacaagaaagatattgaaaataaatacaagaagcaagctactttgaagcaaacaggggaaattgtgtctaatggccatcaaaaagacaatgttttagtgttcggtgttgaaaagtcatcatttttagttccgagtttaatagaagggcataaagcgactaaagataatgaagtgttagctgatgaaacacttaaaaataaaggatttaaaatcggtgacacattaacactatctcaatcagatgaaaaattgcatatcgtaggttttacagaaagtgcaaaatataatgcgtcaccagtcattttcacgaatgacgctaccattgccaagattaatcctagattgactggagataaaattaatgcagttgttgtacgtgatacaaattggaaagacaaaaaattaaaccaagagcttgaagcggtaagtattaatgactttattgaaaatttaccaggttataaaccacagaacttaacattaaactttatgatttcattcttatttgtcatttcagctacagttataggcattttcttatatgtcatgacattacaaaaaacaagtttatttggcatattaaaggctcaaggatttacgaatggctatttagcgaacgtagttatttcgcagacgctcatattagcattattcggtacggcatttggcttactgttaacaggcgttacaggtgcatttttacctgatgcagtacctgtcaaattcgatgtactaacattactcgtatttgcaattgtgttaatgattgtctctgtattaggaagtttattctccattttaacaattagaaaaatagatccgttaaaggcgattgggtaggaggtgtagcaaatgttgaaatttgaaaatgtaacaaagtcatttaaagatgggaatcgtaacattgaagcggttaaagatacgaattttgagataaataaaggtgatattatagcattggttggaccttctggctctggtaaaagtacatttctaactatggcaggtgctttacaaacgccgacatctgggcacattttaatcaataaccaagatattacgacaatgaagcaaaaagcattggcaaaagttagaatgtctgagataggttttattttacaagctacaaatcttgtgccatttttaacggtaaagcaagaatttacattactgaaaaagaaaaataagaatgttatgtctaatgaagactatcagcaacttatgtcacaattagggctaacatcattgcttaataagttaccttcagaaatttcaggtggtcagaaacaacgtgtggcgatagccaaagcgttatatacgaatccgtcgattattttagcggatgaacctaccgcggctttagatactgaaaatgcgattgaagtcattaaaattctacgtgatcaagccaaacaaagaaagaaagcatgtattattgttacacatgatgaacgacttaaagcatattgtgatcgttcatatcatatgaaagatggcgtccttaatcttgaaaatgaaacagtagaatagttttattaagccggtacatcatgtgccggtatttttatgttcatgtattatttgaataaactttcacattcaattaataataattattatcgaaaattagaaatattccgtgaaatataatattttttgtagtaaaatggcctctaagtattcaatatttaaatatggggattgaatataaaattatcgtaatgggggtcaatggttatggatttattgataggtactttatttttatttttggtcttagtgatttttacattatttacatataaagcacctaatggtatgcgtgccatgggagcattagctaatgcagcaatcgcaacatttttagtagaagcatttaataaatatgttggtggtgaagtattcggtattaaatttttagaagagctaggagacgctgcgggaggtctaggtggtgtcgctgccgctggattaacagcattagctatcggtgtgtcaccagtatatgcattagttatagcagccgcgtgcggtggtatggatttattaccaggtttctttgcgggttatatgattggatatgtgatgaaatatacagagaaatatgtgccggatggtgtcgacttaattggatcgattgtcatcttagcgccattagctcgtcttattgcagtattattaacgccagtagtgaatagtacattgattcgaattggtgatattatccaaagtagtacgaatacgaatccaattatcatgggtatcattttaggtggtattatcacggttgtcggcacagcgccattgagttcaatggcattgacagctttgttaggtttaacgggtgtacctatggctattggtgccatggcagcatttagttcggcatttatgaatgggacgctattccatcgcttaaaattaggtgatcgtaagtctacgattgcagtaagtattgaacctttatcacaagcagatattgtatcagccaatccaattccaatctatattacaaatttctttggtggtgcgattgctggtttaattattgctatgtcaggtttaattaacgatgcgacaggtacagctacaccgattgcaggatttttagttatgtttggatttaatcatccgacgacaattgtgatttatggtgtagtaatggcgattgtaggtgcgcttgtaggttatcttggttcaatcgtatttaaaaaatacccaattgttactaagcaagacatgattaatcgaggtgcagtagacgcatagcatcatcatattgaatagtaaaaacaaataaaacatagtaacgtgattcagtcgatgtaacagtcgataatgagtcacgtttttttatagaaaaatataagacataaaaatgtcataatttatagtcgacaaatatcatactgtataaacatttatcattttctcaggtgccttttacgcgatggaatgaacttactttttacgaaattatgcgtattttataaacaaatatcattgatataacggtaaatgtaagcgtttacaacagaaataactgcatgctacgatatttttgtaaattcactgattcaattattttaagtcaatatgaggagggatgttatgagcgattctgagaaagaaattttaaaaagaattaaagataatccgtttatttcacaacgtgaacttgctgaggcaattggattatctagacccagcgtagcaaacattatttcaggattaatacaaaaggaatatgttatgggaaaggcatatgttttaaatgaagattatcctattgtttgtataggcgcagcgaatgtagatcgtaagttttatgtgcataaagatttagttgcagaaacatcaaatcctgtaacgtcaacacgctctattggtggcgtagcaagaaatattgctgagaacttaggtaggcttggcgaaacggtcgcttttttatctgctagtggacaagatagtgaatgggaaatgattaaacgattgtccacaccatttatgaatttggatcatgttcaacaatttgaaaatgcgagtacaggttcatatacagctttaattagtaaagaaggcgacatgacatatggcttagcagatatggaagtgtttgactacattacgcctgaatttttaattaagcgttcacacttattgaaaaaggctaagtgcattattgtcgatttgaatttaggcaaagaggcattaaacttcttatgtgcctataccacgaaacatcaaatcaaattagttatcaccacggtttcttccccaaaaatgaaaaatatgcctgattcattacatgctattgattggattatcacgaataaagatgaaacagaaacatacttaaatttaaaaatagaatctactgatgatttaaaaatagctgctaaacgctggaatgatttaggtgttaaaaatgttattgtgacaaatggcgtgaaagaactcatttatcgaagtggtgaggaagaaatcatcaagtcagttatgccatcaaatagtgtgaaagatgttacaggtgcaggtgattcattctgtgctgcagtagtgtatagctggttaaatgggatgtctactgaagatatattaattgctggtatggttaacgcaaagaaaacgatagaaaccaaatatacagttaggcaaaacctagatcaacagcaactttatcacgatatggaggattataaaaatggcaaatttacaaaagtatattgagtattctcgagaagttcagcaagcacgggagaacaatcaaccgattgtagcattagaatcaacaattatatcgcatggtatgccgtacccacaaaatgttgaaatggcaacaacagtagagcaaattatcaggaataatggtgccattccagcaaccatagccattatagatggcaaaattaaaattggtttggaaagtgaagatttagaaatacttgcaactaataaagacgttgctaaagtgtctagaagggatttagcagaaattgttgcgatgaagcgtattggtgctactactgtagcgacgacgatgatatgtgctgcaatggctggtattcaattttttgttactggaggtattgggggtgtccataaaggtgcagaacatacgatggacatttcagcagacttagaagaactgtctaaaacaaatgtcactgttatctgtgcaggtgccaaatcaattttagacttacctaagacgctggagtatttagaaacaaaaggcgttccagttattggatatcaaacgaatgaattgccagcattcttcacacgcgaaagcggtgttaagttaacaagttcggttgaaacgccagaacgacttgctgacattcatttaacaaaacagcagttaaatcttgaaggtggtattgttgttgctaacccaattccatatgagcatgccttatcaaaagcatatattgaggcaatcataaatgaagctgttgttgaagccgaaaaccaaggtattaaaggtaaggacgccacaccgttcttgttagggaaaattgtagaaaaaacgaatggtaaaagtttagcagcaaatataaaacttgttgaaaacaatgcggcgttgggtgctaaaattgctgtcgctgttaataaattattgtaggtgatgatacatgaaaattttattcgctatcacagggatagcatttgcactatttgttgcgtttttattcagttttgatcgtaaaaacatagacttcaaaaagacgttaataatgatatttattcaagtgttgattgtgttatttatgatgaacacaacgattggtttaacaatcttaactgcattaggttcattttttgaagggttaataaatgttagtaaagcaggtataaactttgtttttggagatatacaaaataaaaatggctttacattctttttaaatgtgttgctgccattagtgttcatttctgtattaataggcatttttaattatattaaggtattaccatttattatcaaatatgtaggtattgctattaataaaataacgagaatggggcgtttagaaagttactttgctatttcgacagcgatgtttggacagccagaagtgtatttaactataaaagatattataccaaagttgtctagagcaaaattatatacaattgcgacatctggtatgagtgctgttagtatggcaatgttgggttcatatatgcaaatgattgaacctaagttcgtagttacagcagtaatgttaaatatttttagtgcgcttatcatcgccagtgtaatcaatccatataaatctgatgatactgatgttgaaattgataacttaacgaaatccacagaaactaaaacattgaatggaaaaacaggaaaacctaagaaagttgcctttttccaaatgattggtgatagtgcgatggatgggtttaaaatcgctgttgtagtagccgtaatgttgttagcatttatttcattaatggaagcaattaatatcttgtttggtagtgttggtttgaactttaaacagcttattggctatgtgtttgcaccaatcgcattcttaatggggattccatggagcgaagctgttccagctggctctttaatggcgactaaattaattacaaatgagtttgtagcaatgcttgattttaaaaatgtcctgggtgatgtatctgctcgaacacaaggtatcatttcagtttacttagtaagcttcgctaattttggtacggttggtatcatcgttggttcaattaaaggcattagtgataaacaaggagaaaaagttgcatcctttgcaatgaggctgttacttggttcaactctagcttcaatcatttcaggagcaattattggcttagtattgtaaattaatcgaagtatctaaattaaattcatggcaacatcaaaaccccatcaccaagttggcgcaacagcgcatcataacttggtgatggggttttatcataacagtctactttttcgtagccgtttttgaaatgtatgttgatggtttatctttttcaaaaattgttaatcccgttatatcttttttatgttttgaagggacaatgaagctaagtatataagcaaagacaaaagcaactgtaaatgaaatggtagatacatagaaaggtgagttacctttgccaacaccattatagacgtaagcaaagatgatacccaatattaatccacaaataacaccgaatgtattcgtacgtttagtgaaaataccaactgcaaatacaccagccaatggaacgccgaataatccagttacaaacaagaataaatcccataggtcatttgaattagaagcaattaagtatagtgacattccaaaaccgaaaatacctgcaatgatgataatgaaacgtgcaaagttaacttcgtgtcgctcgctaccttttccgaagaagcgttgcttaatgtcgattgaaatacaagcagatatagaatttaaactagatgaaatggtagactgtgcagcggcgaaaatggctgcaataagtaatcctgctacaaatggtggcatctcagtcaaaatgaaatatggcactacagatgatgtattgaagccttttggtaaaacagcttcatgtgcataaaatgaatacagcattgtacccataccataaaataagggtgctgaaattaaagctaggataccatttgtccataacgatttatttgtttcttttaaactatcagaagcttgataacgctgcacgacgtcttgactcgctgtgtattgatacaaattgttgaaaatatttcctaggaaaataattggaatggcagctgctgcagtatttagtttccaattgtctgcactaattaattttttgtgctcaatcgcatctgcaaagacagtgccaaaaccgcctttgatattcataacaccaagaatgatgataactaaagcgccgcctaataaaatgacgccttgaatgaaatcactccaaaccacaccttcgaatccacctaaaaatgtatataaaatacatagtaaaccaacgagtgatgcaacgatataagggttcatgtctgatacagatgtaatcgctaatgttggtaagtagataacgattgctacacgccctagatgataaactacaaatagtaaagaaccaatgacacgaatgctaggtccgaaacgtgcttctagatattcatatgcagatgttacctttaactttttaaagaatggaacatagaaataaatgagtaatggaataattgctacgatagcgatgttacctgcaatatatgaccaatctgttaaaaatgctttctctggtgtagacataaacgtaattgcacttaatgtagtggcataaattgaaaagccaactacccaagatggcaagcgaccgcttgcggtaaagaaactattcgtactttggctcgcgcgcttggtaaaataaacgccaatgagtaacatagctagtagataaatgataacggcaacccagtttagtgtgccaaatccaacttctttcatgggcaacatcccctttacaatgtattgattctttgatgtctataaatcgtattttgcaatgagttgatctaatgtttgtcgatgtgcttcgttaaaaggtttgaatggacgtttcggtaatcctgcatcaatgccacggtgacgtagtatttctttcaatgttggataaatccccattgataacacagtttcgatgatgtcgtttgaatcatgttgtagttggtaagcttcttgaatttgaccttgtcttgctaagtcgaagatttttctagcacggcgaccattaacgttatatgtagaaccaattgcaccatctacgccagaaatcgtagcttgaactaacatttcatcaaagccagataagattaatttgtctgggaatgcttttctaatacgttcgagtaggaagaagttcggcgctgtatatttaacaccaacaattttttcgtgattaaaaagctcgctgaattgttcaatagaaatattcacacctgttaaatctggtattgcataaataatcatattgttctgtgttgcttcgataatatcgaaatagtaatctctaatttcttcaaaagtaaatggatagtagaatggtgttacggcagaaagtgcatcataaccgagttctgtggcatattttccaagttcaatggcttcatttaaatctaacgaacctacttgagcaatcaatttcaccttatccccaactgcctctttggcaaccttgaaaacttgcttcttctgctctgtatttaataaaaagttttcgcctgagctaccatttacataaagaccgtctaattcttcagtttcaatggcattttgagcaatttgtttgagtccttgttcatttacttgaccattttcatcaaaaggaacgagtaacgctgcatataaaccttttaaatctttgttcattatgaagtccctccaaaaatcatttgataatatagtttacagctataattgtaaacgctatcataaaatgtaacaatatctttttgaaaattgtagtcatatttatgtataattaatgaaaatatttttcaaaatcaatagaaatggagtgagtaaggtgtattacatcgcaatcgatattggaggcactcaaattaaatcggcagttattgataagcaattgaatatgtttgactatcaacaaataccaacgccggacaataaaagtgagcttattactgacaaagtatataagattgtaacaggatatatgaagcaatatcagttaatccaacctgtcataggtatttcatcagcaggcgttgttgatgaacaaaaaggcgaaattgtatacgcagggccaaccattccgaattataaaggtactaattttaagcgattattaaaatccctgtctccttatgtcaaagtaaaaaatgatgtgaacgctgcattactaggcgaattgaaattacatcaatatcaagcagaacggatcttttgtatgacgcttggtacaggcattgggggtgcgtacaaaaataatcaaggacatattgataatggtgaacttcataaggcaaatgaagttgggtatttattgtatcgtccaactgaaaatacaacgtttgagcaacgtgctgcaacgagtgcattgaaaaagcgcatgattgacggaggatttacgagaagcacacatgtgccagtattgtttgaagcagctgaagaaggtgatgatattgcaaaacaaatattgaatgagtgggcagaagatgtagcagaagggattgcccaaatacaagtcatgtatgatccagggcttatattaattggtggcggtatatctgaacaaggagacaatctcattaaatatatcgagccgaaagttgcacactatttaccaaaagactatgtttatgcaccgatacaaacgactaagagtaaaaatgatgcagcattatatggctgtttgcaatgatggttgaaagaaggagtcattctaaaatagaatttgaaaccgatacgagagatgagagcagttgttagttccacacatcacactctatctaggaccaatctaaactatatcaaccaacagtgtgccacgggcatattaaattgaagacgcttgaacgtatagatttcaaaaatgtaaaaaagtatttggtattgaaattaaaaaagcacctagcaacttgttgggacaatcacgatgattgtttacagttgcaggtggatttgaatatactactagttatttgttgtctaggataatagatttagtatgttgataagtttgactcagatttgtattttctaataaatgataactcacgatatcgattaaaaagagtgtcgcaatttgtgtgttgataaattgatggtcggtattacgcgattgatctgttgttaaaagtactaaatctgcacaatctgtaagtttactaccttcgaaatttgtgatggcaacgacatatgcaccatgagatttggcgacttccgctgctgaaattaattccgaagtattaccactatttgacatagcaataaacatgtccgaatgagatagtagggatgccgatattttcattaaatgtgaatcggtagtaacattaccttttagccccatacgaatcatacgataataaaattcagttgctgataaaccagagctacctagtccagcaaagagtatatgccgacttgattgaagtttgtcgataaaggtttggataatgtcattatcaataaattcgccagtttgttgaatgatttgttgatgatatttatgaattctttgaatgattgggctattttcaataactgtctctgtcatttcttgttgaatattaaattttaaatcttggaaattctcataatccagcttatgactaaagcgtgtcatcgttgctggtgatgtaccaatcgcatgggctaaggagttaatcgttgaaaaggcatcgctataaccattttgtcttatataattgacgatgcgtttatcagtttttgtaaataaatgttgataacgttgaacacgattctcaaatttcattgtgtcaccccttcatcttaatgattactattatatatgaaaaatattttcaagatagtaaaaagcattgataaaaattatcttaatgatatattgtaaatgactttacgtgaaaaaacgacttatggagtgaggaataatgttaccacatggattaatagtatcttgtcaggcactaccagatgaaccattacattcatcttttattatgtctaaaatggcattagctgcgtatgaaggtggtgctgttggtattcgcgcaaatactaaagaagacattttagcaattaaagaaacggtagatttaccagttattggcattgtgaaacgtgactatgatcactcagatgttttcattactgcaacgtcaaaagaagttgatgaactgatagaaagccaatgtgaagtcattgcattggatgcaacgttacagcaacgtccgaaagaaacgttagacgaattagtgacatatattagaacacatgctcctaacgttgaaatcatggctgatatcgcgaccattgaagaagctaaaaatgcggcacgacttggctttgattatattggcacgacgttacacggctatactagttatacgcaaggacaattactttatcaaaatgacttccaatttctaaaagatgtactacaaagtgttgatgcaaaagttattgcggaaggtaatgtcattacaccggatatgtataaacgcgtgatggacttaggcgttcattgttcagtcgttggtggtgcgataacacgaccaaaagaaattacgaaacgttttgttcaagttatggaagattaaatgataacgataaaaaaacgagatgaccatcattaattaaaggtacctaattatcttaggtggctgaatgaatgtaatgggttcatctcgttttgtttgtttatgatagtgattttattttcaactttatccaaaaatgagtaaagcgacggggatagtgattaatagcgacaatgccacgcgtaaaaaccaaatgatgatgagtttccagacaggtattttaatttcagttgctagtatacatggcactaatgctgagaaaaagataatggctgatacgcttactacaccgacgacaaatttagtactcattgcagctttagttactaacaaagatggtaaaaacatttctacaatagaaatcgctgaagcttttgcaagtacagcctgatcagcaattgggaaaatataaataaatggatagaatatatagccaagccaatcaatgaatggtgtatagttcgctacaatcagtcctaaaaaaccaatcgataatatagagggcaaaataccaacagtcatttctaaaccgtctttcaaattgtcccaaacgttcttcacgagggatggcgttaatgcattttgtttcatcgcctctgcatatgcagttttcagtctgcttccttcaatagcaacttcttgttctccttcttgtccgttataatattctgttgattcattggtgattggcggtagccatgcagtaattgcagtcacgacaaatgtgatgactaaagttatccaaaagtataaattccaatgcggcattaatcctaaagttttagcaacgataatcataaaagttgctgaaactgttgaaaagccagtcgcaataatcgtggcttctcttttgttgtacatcccttgcttatagacacgattagtaatcaataatcctaaggaataactgccgacaaacgaagccactgcatcgacagcggattttcctggtgttttaaaaataggtctcataataggctccatataaacaccgacaaattctaataagccatagcctactaataaagaaagcgcaattgcacctactggaattaagatacttaatggcatcattaatttttcaaacaaaaacggaccatagttagctttaaatagtattgatggaccgattttaaatacatacattataccgattattgcacctgcaactttaaataatgtaatgaccaagtttgtgattgaagtcataaaagtacgtctcattattggtaacgctgtaccaattaaaatcataatcagtgcaacatatggcataagtggacctatgattgagcgaatggctagatgaacatgatcgacgaaaatagtgttgttaccattaatcgtaaaaggaataaagaaacatagtatgcccactaaactatagacaaaaaaacgccatgcacttggttgttgtgcattagaatgatattgattcattaaagcaacccctttgtttaaatgaatacacaaaactgtatgatgcatcttccccttaatgagatgaatcattattttaatttagaaaaatctgaaaacttaatataattgtatagtttgaattattttcagaccaatacaaattaactaattatatatagattgaaactatatagcttaataaaatatttatcttaaatgttgttgtgttgattcaacgtcacaattaaagtgtttataaattatttgaggatacagatatttgtaaataattagtatcgatttaatatcgtattattaaatttttattaattttgtagtcttaatcaaaaaataatatatgtcatgttatattgaaggtgcagttgtttttcattctcaagagggggtcaaaaaaatacttttgaggtgattatatgttacgaggacaagaagaaagaaagtatagtattagaaagtattcaataggcgtggtgtcagtgttagcggctacaatgtttattgtttcatcacatgaagcacaagcctcggaaaaaacactaacgtctaatgcagcggcacaaaaagaaacactaaatcaaccgggagaacaagggaacgcgataacgtcacatcaaatgcagtcaggaaagcaattagacgatatgcataaagagaatggtaaaagtggaacagtgacagaaggtaaagatacgcttcaatcatcgaagcatcaatcaacacaaaatagtaaaacaagcagaacgcaaaatgataatcaagtaaagcaagattctgaacgacaaggttctaaacagttacatcaaaataatgcgactaacaaaactgaacgccaaaatgatcaggttcaaaatacccatcatgctgaacgtaatggatcacaatcgacaacgtcacaatcgaatgatgttgataaatcacaaccatccattccggcacaaaaggtaataccaaatcatgataaagcagcaccaacttcaacaacacccccatctaatgataaaactgcacctaaatcaacaaaagcacaagatgcaaccacggacaaacatccaaatcaacaagatacacatcaaccggcgcatcaaatcatagatgcaaagcaagatgatactgttcgccaaagtgaacagaaaccacaagttggcgatttaagtaaacatatcgatggtcaaaattccccggagaaaccgacagataaaaatactgataataaacaactaatcaaagatgcgcttcaagcgcctaaaacacgttcgactacaaatgcagcagcagatgctaaaaagattcgaccacttaaagcgaatcaagtacaaccacttaacaaatatccagttgtttttgtacatggatttttaggattagtaggcgataatgcacctgctttatacccaaattattggggtgggaataaatttaaagttatcgaagaattgagaaagcaaggctataatgtacatcaagcaagtgttagtgcatttggtagcaactatgatcgtgctgtagaactttattattacatcaaaggtggtcgcgtagattatggtgcagcacatgcagctaaatacggacatgagcgctatggtaagacatataaaggaatcatgcctaattgggaacctggtaaaaaggtacatcttgtagggcatagtatgggtggtcaaacaattcgtttaatggaagagtttttaagaaatggtaacaaagaagaaattgcctatcataaagcgcatggtggagaaatatcaccattattcactggtggtcataacaatatggttgcatcaatcacaacattagcaacaccacataatggttcacaagcagctgataagtttggaaatacagaagctgttagaaaaatcatgttcgctttaaatcgatttatgggtaacaagtattcgaatatcgatttaggattaacgcaatggggctttaaacaattaccaaatgagagttacattgactatataaaacgcgttagtaaaagcaaaatttggacatcagatgacaatgctgcctatgatttaacgttagatggctctgcaaaattgaacaacatgacaagtatgaatccaaatattacgtacacgacttatacaggtgtatcatctcatactggtccattaggatatgaaaatcctgatttaggtacatttttcttaatggatacaacgagtagaattattggtcatgatgcaagagaagaatggcgtaaaaatgatggtgtcgtaccagtgatttcgtcattacatccgtccaatcaaccatttgttaatgttacgaatgatgaacctgccacacgaagaggtatctggcaagttaaaccaatcatacaaggatgggatcatgtcgattttatcggtgtagatttcctagatttcaagcgtaaaggtgcagaactcgccaacttctatacaggtattataaatgacttgttgcgtgttgaagcaactgaaggtaaaggtacacaattgaaagcaagttaaattcattttcgtaatttaatatgctatgcatttcgtgctactaacatggcacagcagatataagtaacatcacagtgttgaatttaaaaatagtaaagtgaaataaagcgcctgtctcattagcgaaaactaaagggacaggcgtatctgtttatgagcttaataaattgtatgaataatatggttgattgaataactgtttatcatgatgataaattgagtttttaaaaataatggtatattacgccattgttatagcgtttaagaaatcaacaactttacgataaatagtgattgcttcgtcattaggtctacgatcaaaatcatgctcgtttttattcacgcgttcaaatgttgaatttggaacatgattcatgatatgttcgctttcctcaacgggaacatcataatcgccattacaatgcgcaacgaaaacaggtggaagtgttttaagttcatttggtgagatgttgtattttgaatcggtataatcagcaatattaatcatatttatccatttgcctgtgccacgtgcataaacgtagattaaaaaacgttgtgcgatttgatcttgaacaaccggtgttggtgaagtgagttgtgcaatcattgtttcgtttacgctttgagctattttagcgtaatagctatttgccattttaaaaggttcagtgttgatgcaactataaccataaaaatcaataacaccatcaatatctctgtctcgtgcaattaatagacttaaatatgcacctgatgatctgccaaaggtaaaaatagggcaattagaatattgtgattgaatcgcatcgaatgatgcgtagacatcctcaataatgcaatcgagacttacttctggtaataaacgataacttagttgaattaaatcgtaatgttctgtaaggatatcgatatactgtggagataaatcgttagctttaccgaacattaatccaccaccgtggatgtagacaatagcgccttttgttggttgattttttgctttaataattgtgtaaggtaatgcaaatgcatctttagtaattactttatctttaatttcagtcacgactatacagactccttatttttgaaattgatgtcattataacactgtattaaatttccatgaaaaatagtcttaagacgatgagtcatgataattctgttccaattgacgtaaagcgtcacgggtatgcttctttagactttccccataatccatcattttaacaatatctttaaaagcggcacgcggaatggctaaatcttctaaatctgccatagaaaattcaagattgatatcatgtggccgctgttcagcaagtttatgcacaaagtcaggttctgtgacaaaaggcgaagacatgccgaccatatctgcatgttgtaaagcatctaaagcagactctggagaattaatcccgccacttgcaattaaagggatacgacctgctaaatgttcatagacaatttggttaactggccgaccgaaatgttcacctggtgtacgagacgtattttgataaatatgtcgaccccagctagcgattgctaaatattggatgtttgaaacgtccatgacccaatcgattaattgattgaactcgtcaatggtatatcctaaatcactacctctggtttcttctggcgttgctcgaaatcctaaaataaaattgtcaggtgcttctttatcaatcacttcttgtaccgcacgcataacttctaaacataattttgcacgattttttaatgagtcggcaccgtaatggtctgtacgtttattcgaaaaagttgagaaaaatgtttgaatcagcaaacgttgtgcaatcgaaatttccacaccatcaaaacctgctttaatcgcgcgtaatgtagcatcacgatactgctgaatgatgctattgattttctcttgagacatggcgataacatcgtgttcaatcggtgaatgcaacgtcatagggcttggtccatacacctttccaaaatttaaaattgcttgatttgaaaaacgaccagcatgcgctagctgaataatagcgaggctactatgttgtttcatcgtagatgccatgttagttaatccagggatacaagcatcatgatcaatattaaagccgtattcaaacaattgaccataaggttcaatgtaagcagcgccggtgacttgcataccagctgaattagagcgacgtgcagcataagccaagtctgcttttgtaatatagccttcttttgttgatgcgtttacggtcattggtgataatacaaagcgattcgaaattttgatgccattaggtaagtggattgattgtaaaagtggtttgtatcggtacatactatgattccttttctattcaatattgttttcaaagtaccatggaaagactgaataatcaatgatgaacagtcttgatagaatagaattggtacatggaaagcatttttaaaattaaactaatgaatggcatttgtaggtctgaaaatatgaatatgaaaaagaaaaataaaagcgaaaagatataaaagttaattgaaaaacgttatcatatacgtgggtatatgaagagggaatggtattaagaacgttaaaatgttatgtcggtttgacatgacaggataagtttggagatgacggattggttaaattaagcgtattagactatgccttaatagatgaaggtaaggatgcacaaaaggcattgcaagattcagtgacacttgcaaaattagcagatcgacttggctttaagcgaatttggtttacggaacatcataatgtaccagcgtttgcgtgtagtagtccagaacttttgatgatgcatacattggcgcagacaaatcacatacgagttggctctggtggtgtgatgttgccgcactatcgaccttataaaattgctgagtattttagaatgatgacagcgttatatccaaatcgtattgatttaggtattggtaataatccaggtactactatggtaaagcaagctttagatggaataaatcctacatatgatagttacgatgaatcgatttcgttattatgtgattatcttacaataaaggataaaccaagtgcgcatatgttaggtgtccaaccacacattgatcattttccagaaatgtggttattaagtagtagcgcaacatctgccaaaatagctgccgaactaggtatagggctttctgttggaacatttttgctaccagatataaatgcgatacatgcagcgaaggataacattgatatttacaaaaaacatttccgtgcatcaatgattaaaatggacgcaaaagtgatggcatctgtatttgtcattgtagctgataacgaagcggaagtagcagcattgcaacatgccttagatgtttggttattaggtaaattacaatttgcagaatttgaacattttccatcggtagacacagcgcaaaagtataagcttaatgatcgagacaaagagatgattcaagcacatcaagcacgcatcattgcaggtacacaagaacaggttaaagcacaattagatgatttcattgctacgtttgaagttgatgaggtgttagtagcaccgcttattccaggcattgaacagcgttgtaaaactttaaaattactcgcggaaatttatttgtagcattttaaatagaagagaaaggatgaagataagatgaaaaagttagccaattatttatgggtagaaaaagtaggagatttgtatgtgtttagtatgacacctgaattgcaagatgatattgggacagtaggttatgttgaattcgtgagtccagatgaagttaaagtggatgatgaaattgtgagtatcgaagcatcgaaaacggtcattgatgtgcaaacgccattgtcaggaacgattattgagcgaaatacaaaagcggaagaagaaccgacaattttaaactctgaaaaaccagaagaaaattggttgttcaaattggatgatgtcgataaagaagcattcctagcattaccggaggcttaaatggaaacgttaaaatcaaataaagcgagacttgaatatttaatcaatgatatgcgtcgagagagaaatgacaaagacgtattggtaatgccatcttcatttgaagatttgtgggaattatatcgaggcttagcaaatgtcagaccggcattacctgtaagtgatgaatatttagctgtacaagatgctatgttaagtgatttgaatcgtcaacatgttacggatttgaaagatttgaagccgataaaaggtgacaatatctttgtttggcaaggtgatatcacgacgttaaaaatcgatgctattgttaatgctgcaaatagtcgttttctaggatgtatgcaagctaatcatgactgcattgataatattattcatacaaaagcgggtgttcaagttcgacttgattgtgcagagatcattcgacaacaagggcgcaatgaaggtgtaggtaaagccaaaataacacgtggatataatttgccagcaaagtatataattcatacggttggtccgcaaatacgtcgattgcctgtttcaaagatgaatcaggacttgttagctaaatgctatttgagctgtcttaagcttgctgatcaacatagtttaaatcatgtcgctttttgctgtatatctacaggtgtatttgcttttcctcaagatgaagcagcagaaattgctattcgaacagtagaaagctatctcaaagaaacaaattcaacattgaaagtcgtgttcaatgtatttacagataaggatttacaactgtataaggaggcatttaaccgtgatgcagagtagtaaatggaatgcaatgtctcttttaatagatgacaagacaaagcaggctgaagtattgcgtactgcgattgatgaagcagatgcgatagtgattggaattggtgcaggcatgtctgcatctgacggatttacatatgtaggagagcgttttacggaaaatttcccagattttattgaaaaatatcgcttctttgatatgttgcaagcgagtttacatccttatggcagttggcaagagtattgggcatttgagagtcgttttattacattaaactatttagatcaacctgtaggtcagtcttatctcgcattaaaatccttagtggaaggtaaacagtaccatatcataactacgaatgcagacaatgctttcgatgctgctgaatatgatatgactcatgtatttcatatacaaggggagtatatactgcaacagtgtagtcagcattgtcatgctcaaacgtatcgcaatgatgatttaattcgtaaaatggttgttgcgcaacaagatatgcttataccttgggagatgattccaagatgtccaaaatgtgatgccccaatggaagtgaataaacgtaaagcggaagttggcatggttgaagatgctgaatttcatgcgcaactacaacgttataatgcttttctagagcaacatcaagatgataaagtgttgtatttggaaattggaattggttatactacaccacaatttgtgaagcatccttttcagcgtatgacacgtaaaaatgaaaatgccctttatatgacgatgaataaaaaggcatatcgcattccgagttcaattcaagaacgtaccatacatttgactgatgatatctcaacattgattacagcagcactccggaacgacagcacaacgaaaaataacaacattggagagacagaagatgtacttaatagaaccgattaggaatggagaatatattactgatggtgcgattgcactcgctatgcaagtttatgttaaccagaatatctttttagatgaagatattttatttccttattattgtgatccaaaagtggaaattggacgttttcaaaatactgctatagaagtgaatcaagattatatagataaacatagtattcaagtagttcgccgagatactggtggtggcgctgtgtatgttgataaaggtgccgttaatatgtgttgtattttagaacaagacacttcaatttatggtgattttcaacgattttatcaaccagctataaaagcgttgcatacattaggtgcaacagatgtgatacaaagcggtagaaatgatttaaccttgaatggtaaaaaagtgtcaggcgccgcaatgacattaatgaacaatcgtatttatggcggttattcgctattacttgatgttaattatgaagcaatggataaagtgttaaagcctaatcgcaaaaagattgcatcgaaagggattaaatctgtgcgtgcacgtgttggtcatcttagagaagcactggatgaaaagtatcgggatataaccattgaagaatttaaaaatttaatggtgacgcagattttgggaatcgatgacattaaagaggcgaaacgatacgaattatctgatgcagattgggaatcgattgaagaattggcgagtaaaaagtataaaaattgggattggaattatggaaagtcacctaaatatgaatataatcgaagtgaaagattatcatcaggtactgtagatattactatttctgttgaacaaaatcgtattgcagattgtagaatttttggtgatttctttggacaaggtgatataaaagatgtggaacaagcattacaaggaacaaaaatgacaagagaagatttaacgcatcagttaaagcaattagacatcgtttattattttggtaatgttacggttgaatcattggttgagatgattttaagttaatattgtttaggcgttaatgtcacaccctcgttaaatatgtgtatttgcttttaaaatggtgactatgtagttatgtgatttgaacatacgattgaaaatgaaattagttaattagcaaagacatcatatttatagcgtttgtgtttattagtgattgggtatttgaaaatggttaatgatagtttttaaaggaataaattcattttcatttatacaagtaagattaaatactagctaccaaagtctatttatatacgtcaaaatataatgactgctataatgagtaatcaatagacacaaagaggagattatgtgatgaataataaagtattagtgaccggtggtacagggtttgttggcatgagaattatttcacgattattagaacaaggttatgaggtacaaacgacgatacgtgatttaagtaaagctgataaagtaattaaaacgatgcaagacaatggcatttccacagagcgattaatgtttgtcgaagcggatttatcacaagatgaacattgggatgaagcaatgaaagattgcaagtatgtcttgagtgtagcatctccggtgtttttcggtaaaacagacgatgcagaagtgatggcgaagcctgccattgaaggcatacaacgtattttaagagctgcagaacatgctggcgtgaagcgtgtggtgatgactgcaaactttggtgcagttggttttagtaataaagataaaaattcaatcacaaatgaaagtcattggacaaatgaagatgaaccaggtttatcagtatatgaaaaatcaaaattgttagctgaaaaggcagcgtgggattttgttgagaatgaaaatacaacagtagaatttgccacaatcaatccagttgcaatttttggaccatcattagatgcacacgtttcaggaagctttcatttattagaaaatttattgaatggttcaatgaaacgtgtacctcaaatttcattaaatgttgttgatgtgagagatgtagcagaactacacattttggcaatgaccaatgagcaagccagcggtaaacgatttattgcgacggctgatggggaaattaatttattggaaattgcaaaattaattaaagaaaaacgacctgaaatagctcaaaaagttgctactaaaaaattgccagactttattttgagtctaggtgctaaatttaatcatcaagctaaagaaggtaaacttttattagatatgaaccgcaatgtaagtaacgaacgtgcaaaaacattacttggttgggaaccgattgcgacacaagaagaagcaattttagcagcaattgatagtatggctaaatttcatttaatataatacaaaaacaccgtccataagtaagtggctttcctcttgataaaaggggcattcactcaatatgtgacggtgttttatatttttacgttaacactattgctgtggcttttgacgaccttttaataaaattgctgtcgcacctacgataataataaatagaatcgcaccaaataatcccacatattttactgcgttaccgaacacgataccgacagctaaaaagtctgtatctgagaatgttgttgcagcaccacctaattcgcctaaaaatggcaagaataataatggtaaaaacgtgattaggataccatttagagcggcgccagcaacagcacctttaataccgcctcttgcattaccaaatacagcagccgttgcacctaagaagaagtgtgcaactacgccaggtaaaatgacgacgccaccaaataagaataagataaacataccaatgacacctgtaataaagctgacaaagaatccaattagtactgcattttgtgcataagggaacacaatagggcagtctaatgcaggtttagaatttggtacaagcttttcagaaattcctttaaatgctgggacgatttcagctaagattaagcgaacgcctgttaaaataataaatacaccagcagcaaatgtcacgccttgaattaatgaaaagacaataaagttttgaccattactaatagattcgtgtacataactaacgcccgcaaataagcatgcgatgaagtaaagtaatgccatcgtaatcgagatactaattgtactttctcgtaagaaacttaagccttttggaaatttaatctcttccgttgatttagacttacctttgaataattgacctacagcacctgcggcaaagtaactgattgagccgaaatgacctaacgctacttggtcattccctgtaatttttcgcatcgtaggttggagtaatgcaggtaagactgccatgattaatcctaatacgagtgcgccgataacaatcgttagccagcctttaatatgactgactgttaaaatgattgctaaaaacgcagccatgtaaaatgtatgatgacctgttaaaaagatatattttaaattagtgaagcgggcaattaaaatattaacaatcatgccacagaccatgatgagtgcagctgttgttccaaaatcttttaaggctagtgagacgatagcttcgttgttaggtacgataccttgcacaccgaatgcgtgttggaatattttgccgaatggctcaagagatcgaacgacgacatcagcacctgcacttaaaattaagaagcccaatatcgttttaatggttcctgaagtgattgttgcggcaggttttttctgaacgattaaacctataaaggcaatcagtgcaacaagaatggctggttgacttaaaatatcgactataaaattaaggattgcttgcataggtcgtacctcctttaaatcatgttaagttgttgtaatttttctgcgagcttttgttgcaattcagctttgtctaaaatattatcaagaactaagacatcccctagacgttcggcattttcagctaaatctctaccacaaataaacaagtcagccatctctggacttgctgtcataatgtcactatgttcaacttcgatatcagatggtgcattaagttgcctaagtgcttcttgtgcgttcatttctaccataaaactacttcctaaaccgtggccacatactactaaaattttcatattaatcatgctcctttaaaatgtttttaatgtcttgtgcgtttgttgcagttaatagttgctggactgtttggttatcgcccagtacggttgctaaattttgtaatacagataagtgtgaatgattgtcgatggcactcaatacaaaaatgagtgatgcgtagtgatcttcatcacaaaatgccacatgttggttcaactttaatagacttaaaccaacttgatgtacgtcattgttcggtcttgcatgtgcaattgcaatttcaggtgcgataacgatataaggtccaagttcattaacgctatcaatcattgcttgaacatagccttgttcaataatttgttcttgtagtaatggctgagaagctatagttatagcttcagtccaatcatttacttgttcttttacaatgatgcgtgttgttgacaaaatgtctaatgacacgttattaaacctcctttgtcatagttaaagcaatgtgttgtttaattttaaaaatattcccatctaagaaatcttgtcgatataagtcgttgcttaagcattcgcttaactgtcccaatgcctttaaatgtgcattgggatggtccgttgctaatgtaatgacaaggtgaacgggatcgttagctttactaccaaaaataatcccttcagtgaaataagttagtgcgaaacctacaccattctgtacataatcagtaccagcgtgaataagtgcaatatgtggactaatgaccatatatgacccgaattgttctaattgttttaaaattgcagctgtataatttgaattgacaatgccatcattgattaaaggttgcacagccactgtaattgccgattcaattgataatggttgtttatttataatgatgcgatgttcaggcaataaatctgcgagtgacttgccatcagttgccattttcatgactcgttgttctcttgagtcattgataatttgattcaatttttgacgagattgctgattgataaatggatcgacatgaataactggtacagctgagatttcacaaggtactgttgaaatgacataatcaatgttatcttgcaataatcgactttcttccaattgataaatggaataggcatcccaaatgtgaaactcaggatacagatgatttagttttgattttaaaagttgcgacgtgcctataccagaaccacatagtaagacaaccttaatcattgattgtttatgtgttgcaacacgctctatacttgatgcgaaatgaattgtaatgtatgttaattcatcttcgttgaagcgaatagcagcatcttgttcaattgggctaatatgcttgctaacggcttcaatgatttgaggatagcgacgcataacttcttgcctcaaaggattaggttgtagcatatcgtatttaatacgatgtatagctggtttgatatgtgtgatcagactggtatgcaacttgttgtcttttgacatatcaatgcctaattcttggctaacacaagtgatcaattcatgtatattttgcgataaatcatggtattcaaaggtaattgaagatgctgtatgttcggtcattttagagcctagtaaatgtaacgtgataaagataatttcagactctggaaatgtgacattacaactgcgttctaagttttctatcatttttgaagcaatagcatactgattagtatgtcgccatttattaatttcattgataggtatatcgaacgaaaaattttcatttagacgctgaatggcaatgagtatatgatagattaagccatcgatagccgactgaactaaatgataattttcactatttaatgtcttaataatggcacggcgaaccaatgcgattgattctgaattaaagatatcagcctctataaaaggtgcagcttgtttcatatattgatgtataaagtgtgcatacgctttacgataatgatcttcctcaccaataatattgaatcctttattgtggacataatttaactttaaatggtattgatctagttgggcttgaatcattttaatatcatctgcaattgtccgacgcgaaacattaacatcttgtgcaagttgctttgttgaaacaggatcagttgtttcgaataactttaaagcgatatgtgtgagtcgctcatcttttgaaaaatgaatttgattcgttagattgtgctctaattcatttaatatcgttgtgttagctgttgttactttgatgcctgcagctttattacggctgacttggtaatgataagtttcagcatattgctcaatatatgctatatcatattgaatggtacgaggtgatacaccaagttgattagcaatggtattgattggaataaacgtttgctcatgaattaaaagatacaaaatttcgatttgtctataacttaacaacgtaatatcctcctatttgtaattgtaagcgatttcttaaaaacgtagatatgcaatctctttcatattttaatccgaaaaattgcatatcaaaatgtttatgatgcaagattttataggaacttttaaaataaattagatattcatgttgacaatttaaaaatgttgcagtatatttagttagacatctaacgaaatggtggtgcaataaatggaattcacttattcgtatttatttagaatgattagtcatgagatgaaacaaaaggctgatcaaaagttagagcaatttgatattacaaatgagcaaggtcatacgttaggttatctttatgcacatcaacaagatggactgacacaaaatgatattgctaaagcattacaacgaacaggtccaactgtcagtaatttattaaggaaccttgaacgtaaaaagctgatctatcgctatgtcgatgcacaagatacgagaagaaagaatataggactgactacctctgggattaaacttgtagaagcattcacttcgatatttgatgaaatggagcaaacactcgtatcgcagttatctgaagaagaaaatgaacaaatgaaagcaaacttaacgaaaatgttatctagtttacaataaatggtagagtgactggtagaaatcagtcactttatctttaatgttatagttagatatctaattgttagtaagctaattatcggaaaagacaaggagtattgaacaatgaaagacgaacaattatattattttgagaaatcgccagtatttaaagcgatgatgcatttctcattgccaatgatgatagggactttattaagcgttatttatggcatattaaatatttactttataggatttttagaagatagccacatgatttctgctatctcactaacactgccagtatttgctatcttaatggggttgggtaatttatttggcgttggtgcaggaacttatatttcacgtttattaggtgcgaaagactatagtaagagtaaatttgtaagtagtttctctatttatggtggtattgcactaggacttatcgtaattttagttgctttaccattcagtgatcaaatcgcagcaattttaggggcgagaggtgaaacgttagctttaacaagtaattatttgaaagtaatgtttttaagtgcaccttttgtaattttgttcttcatattagaacaatttgcacgtgcaattggggcaccaatgatttctatgattggtatgttagctagtgtaggcttaaatattattttagatccaattttaatttttggttttgatttaaacgttgttggtgcagctttgggtactgcaatcagtaatgttgctgctgctctgttctttatcatttattttatgaaaaatagtgacgttgtgtcagttaatattaaacttgcgaaacctaataaagaaatgctttctgaaatctttaaaataggtattcctgcatttttaatgagtatcttaatgggattcacaggattaattttaaatttatttttagcacattatggaaacttcgcgattgcaagttatggtatctcatttagacttgtgcaatttccagaacttattatcatgggattatgtgaaggtgttgtaccattaattgcatataactttatgtcaaataaagggcgtatgaaagacgttatcaaagcagttatcatgtctatcggcgttatctttgttgtatgtatgattgctgtatttacaattggacatcatatggtcggactatttactactgatcaagacatcgttgagatggcgacatttattttgaaagtaacaatgacatcattgttattaaatggtataggtttcttgtttactggtatgcttcaagcaactggtcaaggtcgcggtgctacaattatggccattttacaaggtgcgattatcattcctgtattatttattatgaatgctttgttcggcctcacaggtgtcatttggtcattattaattgctgagtcactttgtgctttagcagcaatgttaatcgtctatttattacgtgatcgtttgacagttgatacatctgaattaatagaaggttaaatatttcgtacacttctcgctgagtatatttcggtcggaagtgtatttttcgaaaaaataaatatatgatacgattatgaaaaaataaagtgagattggcatatgtataaatctaaaatactgttgaaatatatttttagtgaagaatcagaagttaaagatttaactgaagaaaaatataatcaagattacgaagcattaacatttagctttaaagaggaaacatatcaaagtaggttagctaagaaaacaccgactaaagcagggtattttgttacatgttggacaaaagacgagaacaattgtaatcaaccatactcaaaagaggcatttgcagattacttaatgattatagttattgatgaagaattaagcggttatttcttatttcctagggaattattggtagaaaaaggcatcttaactacatttgaacataaaggtaagatggcttttagagtttatcctaagtggtgtaatcaattgaataaaagagtagagcaaacacaaaactggcaatgtaaatatttttttgaatactaattaaaaagtcatatggttgaacttataagagatgaatatatcatctttcgataagataaccatatgactttattttttatcatttaatgatgaacggtttcttgtcctactttattccaagtgaggataaagctcaacattgcaaacacactgattgctgttaataaaataaaaccgacatcccatccgaatttatcaactacagcacctaagacgatgttggccattacagcaccaaacagataaccaaataatcctgttaatccagctgctgtgccagctgcttttttaggtacataatctaatgcttgtaaaccaattaacataactggtccatatattaagaaaccaatggcaattaatgagacattgtctaaccaagcattgcctggaggatttaaccaataaattaatacaaatactgtgacacctaacataaagaagaaacctgcaggtccacgacgacctttgaataatttatcagaaatgtaaccacataataatgtaccaggaattccagcccattcgtataagaagtatgcccaacctgatgcttttaagtcgaaatgtttttcttcacttaagtagactggcgcccaatcaagtacaccataacgcacgaaataaacaaatatatttgcaaaggcaattgcccatacccatttattgttcagtacatatttaaataaaatttcttttgtagttaattctgtttctaatgttttcttatcgcttgtagcaaagtcatttttataaatttcgatcggaggtaaaccttgagattgaggtgtgtctctaatcaatacgtatgaaattgcggcaatgataagtgctaagagtgcagggtaaatgaatacaccttcgaaaccttttaaataaccaaagttgataaatgctgttgttgtaataccccaagcagcaataggtgccataatacctccaccaacattatgcgcaacgttccaaagggcagtcttacttccgcgttcacttacactaaaccagtgaacgagaacacggcctgaaggtggccagcccataccttgaaaccatccatttaagaataataggacaaacataataccgatacctgatgtaaagaacggtacaaatcccattaacaaattgacgatagcagtgagtactaatccaagaactaagaatatccgagcattgctccgatcacttacagtacccataaagaacttactaaatccatatgcgatggaaacagcagaaagtgcaaaacctagttccgcttttgtaaaaccttgctcttgcaatgccggcatcgctaatgaaaagtttttacgtaataaatagtacccagcgtaaccgatgaaaataccaagaaatacttggagacgtaatcgtttataggtatcatctatctgattttctggcaaaggcttaatatgctttgcaggtttaagaaaattcataaaatcctccttaatatgtatttatatgcattttgtgcgataaacttatattagacatgtatgaaagcgttgtcaatatacttttgtgaaatcttgcagatttagtttttgaattattttataaacatttagaaaaaataaattgccacacataaatttataattatgcaattattatgtcgttatacatactagatgtgtatctacgaatgagtgcaaacatatttttatttgcagaaaaggggtaaatggcatataactatcttttttatgtaagttggtataaaatttatactaataggagggatagtatgaatatagtagggcatcatcacatatccatgtatacaaaagatgcaaaacgtaataaggatttttacacaaatgtccttggattacgattggttgaaaagtcggttaatcaagacaatccttcaatgtatcatttgttttatggggacgaagtaggtacagccggaacaattttaagtttttttgaaattcccaatgcgggtcataagcagccaggtactgaaacgatttatcgattttcattattagtaccaaatcaagcggcacttcattattttgaaaaacgtcttgagaataatggtattaagtctgaacatttgtactatcttggacaagaaggtgttgtctttaaagatgaagacgacttagaaatcatactgcttgttaatgatagttttgaagtaccacatcaatggcaacataacgcttatagtgaaatacctcaagcatatcaaattttaggaatagggccagtagaattaagagttagaaatgcagcgcgtacggtagaatttttggaaaatgtcttaggttatcgcaaaagagataataaagcattcgatgtgctgacattagcaccacaaggtttatattcggattttgtagttattgagcaacagggacaacgtgaaagacctggacgaggttatatccatcatattgcagttaatacaccacaaatgagtgacttagatgcaatttacaagaaattacaacaacaaccacaaagtaattcaggtataattgatcgctatttctttaaatcattatactatcgccataattcaattatgtatgaatttgcgactgaagcgcctggatttactattgatacacctgttgaacaattaggaagtcaattgaacttgcctgactttttagaagcagaacgtgaacaaattgaaagtaagttacacgaaatataaaggagaatgtttaatggcaaaattagaaatgaataaaaatacgcctcttgagtttggtttgtattccttaggtgatcatttattgaatccatttaaaggtgaaaaagttagttatgagcaacgtattaatgaaattattgaagcaagtaaattagcagatgaagcaggtattgatgtttttgcagttggtgaaagtcatcaggagcattttacaacacaggcacatacggttgtgttaggtgcaattgcccaagcgacaaagcatattaaagtttcaagttcttcaacgattattagtgcaacagatcctgtaagagtatttgaagacttcgcgacattagatttgatttctcatggtagagccgaaattgtggctggtagagcatcaagaacaggtatttttgatttgtttggctatgatttaaaagactatgatgaattgtttgaagaaaaattaggtttacttttagagttaaataaaactgaacgtattacttggtctggaaaatatcgtccagaacttagaaatatgaaaatattcccaagaccaattgataatacattgccaatatggcgtgctgttggtggtccacctgcaagtgctatcaaagcgggaaaacaaggtgtgccaatgatgattacaacccttggtggcccagcaatgaactttaaaggttctatagatgcttatcgtcaagcggcaactgaagcaggtttcgatgcttcgcctaagtctttaccagtaagtacagcgagtctgttttatacagctgaaacaactcaggatgctatgagagaattttatccacatttgaatacagggatgtcatttattcgtggcgttggttatccgaaacagcaatttgctaattcaccagattatagagaagcgctaatggttggaagcccgcaacaaattattgaaaagatattgtatcaacacgagttgtatggtcatcaacgatttatggcacagattgattttggcggtgtgccatttgaaaatgttatgaagaatattgagttaattggcaacgacattataccggcgattaaaaagcatttatcaaaataggaggggcgtcatcatgaatattgtattattgtcaggttccacagtaggttctaaaacgagaattgctatggatgatttaaaaaatgaactagaagtcatcaatgagggacatcaaatagagttgatggatttacgagaacttgaattagaatttagtgttggaaagaattatctagatactacaggagatgtatataaattaacgacgtcgttaatgcaggctgatgtgatttttattggttttccaatttttcaagcttccatccctggtgctttgaaaaatgtatttgatttacttccggtcaatgcgtttcgcgataaggtaataggacttgtagcgacagcaggttctagtaaacattatttaattcctgaaatgcatttaaaaccaatattgagttacatgaaagcacatacgatgcaaacgtatgtattcattgaagagagggacttttcaaatcaacaaattgtcaatgatgatgttgtatttcgtttaaaagcgttggcacaatccacaatgcgaactgccaaagtacaacaacaagtgcttgaagaagaaaacaaccaatacgacttttaaagtataaaaataagacgctcggcacactaaatttgtatgtgtttgagcgtcttttcatattaattatatagccagtgaacgacgataaaggcaagtgatgacaagcatattgaggtaataatgattgtcataagcggtttaagtgcacgatttttaagatctttaaatgcaacatttaaccctaaagcaaccatggccattaataagcaaattgttgatacagtatttaaaatatttaacaatactgatggaatagttacatatgtattcactaaggccataatgacaaatccaattaaaaagtatggaatgcttattcggcccttgctagatgattctgatgaacggaaacgcataattaaaataagtacgatggttaatggaatcagtaagaatactctaccaagtttaccaagcagtgcgattttaagtgcatcactaccaccaaagccaccagctaagacaacgtgtgcaatttcatgaagactaacgccggaccaagcgccataaacatttgtcgtcattgaaaagatagcgtagatagctgtatatataagtgaaaatatcgtaccaatcaatgcgatgataccgatactaatagctgtatccttttcacgtgatttgaatattggggctactgcagcaatagcggcagcaccacaaacgcctgtacctacacctagtaataatgcgatgtttttgtcaccatgcaacagtttgttgacaaagagcatcattacaatactgaaaataacgacacctacatcgatggctaatagtctactaccttgaccgataatatcgaatatattgagtttaagtccatataggatgattgcaaatcttaataaatatttagatgaaaacgtaatacctgagctatattgttcaggatatcctctaaagtgacgatatagaatagcgattaatatcgcgatagttaatgcgccaaccttatctaagattggcaatttagctgctaaaaagctaaataatgcgactataaatgttaatgatagtccaatcataaaatgcttatttttcaatgatgccatgagcagtgcctcctttaatagcattttagcactgttttgtcgtatttttaaatataaatttggaatgaataataaaatggtatttaaattaagttgtgtgatagggaatagggtgatgtgtaagaagcgctacataataaatcattagtgggtctttatcaattctatttcacttccttagttgatagaaaacaaatttaatatgcaaggtgaaataacaatatgttattatagtgataatttacagaattatatgaaaaatgaatgaggatgtgatggtatgtttggaatgaaagtgaatggacaaataacattaaaaattttagaagcccatgacacagaagcgcttttcaatttagtcaatcgttcaagaaattcacttagggaatggttaccttgggtagatgcaactgagcaaccatcagatacgcgtgcatttattaaaagaggacttttgcaatttgctgatggtaatggatttcagtgtggcatttggtatgaaggaacgctagttggtgtcatcggtttacatgaaattaatcacatgcacagaaaaacttctttagggtattatttagataaacaatttgagggtcatgggattatgacacaagcagttgaggcattgataaagtattgcttcgatgagattgacctaaatcgaattgagatcagtgccgcagttaataatgaaaaaagtcaagctattcctgaaaggctgggatttactagagaaggtatgttacgtgacaatgaattactaaatggtatttattcatcgagttacatctatagtttattaaaatcagaatataatgaaggatgataaatcagactacaaaagagtgatgacttacatataagtgttactcttttatttattttcaaactaaaaaggttgttgacagtattattttataacaatataatgattttgataattattatcaactagataatgttcatgggaggatgccttaaaatcatcattttaagagccacgtattatcttggcatttagggagtgtgagatagtacgaatgagtgcatgtctatggggataatagaatttctataatgaggtgtcaaaatgaaaaagttaacaacgctattattagcatcaacattattaattgctgcatgtgggaacgacgatagtaagaaggatgattcaaagacatcgaaaaaagatgatggtgttaaagcagaattaaaacaagcaacaaaagcatatgataaatatactgatgaacagttaaatgaatttttaaaaggtacagaaaaatttgttaaagcgattgaaaataatgatatggcccaagcaaaagcgttatatccaaaagttcgtatgtattatgaacgctctgaaccagttgcagaagcatttggagatttagatcctaaaattgatgcacgtcttgcagatatgaaagaagagaaaaaggaaaaagaatggtcaggatatcataagattgaaaaagcattatacgaagataagaaaattgatgatgtgactaaaaaagatgcacaacaattattgaaagatgcaaaagaattgcatgccaaagctgatacattagatatcacaccaaaattaatgttacaaggttctgttgacctattaaatgaagttgcaacttctaaaatcacaggtgaagaagaaatttattcacatacagatttatatgattttaaagcgaacgttgaaggcgcacaaaaaatttatgacttatttaaacctattttagagaaaaaagataaaaaattaagtgatgatattcaaatgaacttcgataaagtgaatcaattattggataaatataaagataacaacggcggttatgagtcatttgaaaaagtatctaagaaagaccgtaaagcatttgcggatgctgttaatgcattaggagagccactaagtaaaatggctgtgattactgaatgacaaattatgaacaagttaacgatagtacgcaattttcaagacgtacatttttgaaaatgttaggtattggcggtgccggtgttgcaattggcgcaagtggtgttggtagcatgtggtctttcaaatcaatgttcaatacaccagaagatccggaaaaagatgcgtatgaattttatggtaaagtgcaaccaggcattaccacacccacgcaaaaaacatgcaatttcgttgcattagatttgaagtcaaaagatagagatgcaattaaggcaatgtttaaaaaatggacggttatggctgatcgtatgatggatggtgatacagttggcaaggccagtaacaatcctttaatgccgccagtagatactggtgaatcgattggattaggtgcaagcaagttaacgattacctttggaattagtaagtctttgatgaagaaaattgggttatctagtaaaattcccgatgcctttaaagatttaccgcattttccgaatgatcagttaatagacgattacagcgatggtgatattatgattcaagcatgctcaaatgattcgcaagtatcctttcatgcggttcataatttagttcgtccatttcgagatattgttaaggtacgttggtcgcaatctggttttatctctgctaaaggtaaggaaacacctagaaatttaatggcatttaaagatggaacaattaatcctagaaagagtaatcaacttaaagattatgtgtttattgatgacggatgggcgaaacatggaacttattgtgttgtcagacgtattcaaatacacattgaaacgtgggatcgtactgcactggaagaacaagaggctacatttggtcgcaagcgacatagtggcgcaccgttaacaggtgggaaagagtttgatgaaattgacttaaaagcgaaagatagtcatggcgagtatattattgataaagatgcccatacgagactagcgaaagaagcaaatacgtcaattttacgtagagcctttaattatgttgatggtacggatgaccgcacaggtaacttcgaaacaggcttgttgttcattgcttttcaaaaagcgacccaacaatttatcgatattcaaaacaatttaggtagtaatgataagttaaatgaatacattacacatagaggttctgcttcgtttttagtattaccaggtgttagtaagggaggataccttggtgaaacattatttgactaaaattatagcaatgctaattactgctgctatggtgtgtaactttgggttattgaaaagtcaggcagcagaacaacaaagtattagtgatgtatatagtgtgataacggatgcgaaatctgcactttctaataattcgatatcgaatgacaataagcagaaagcaattgagcaagtggtaagtgcagttaagaaattatcgcttgaagataatagcgaaggtaatgctgtcaaatcaaatgtgagaaagcttgaagatgcaaaagcgaatgatgatcaaaaagatacactttcgcaattaacgaagtcattaattgcttatgaagagaaattggctagtaaagatgcgggttctaaaattaaactattacaacagcaagtcgatgccaaagatgctgcgatgacaaaagcgattaaagacaaaaataaagcggaattagaatctttgaacaatagtttgaatcagatttggactagtaatgaaacagtgattcgcaattatgacgcaaatcaatatggacaaattgaagtcgcattattacaacttagaattgcaattcataagtcaccattagatacggcaaaagtgtcacatgcttggacaacttttaaatcaaatattgatcatgtcgataaaaaaagtggtacgtctgcaaatgatcaataccatgtatcacaattaaatgatgagttagagaaggcgattaaagctatcgacaacaatcaattgtcggatgctgatactgcgcttacacattttatagaaatttggccgtatgttgaaggtcaaattcaaactaaagacggtgctttgtatacgaaaattgaagataaaataccatattatcaaagtgtattagacgaacataataaagcacatgtgaaagatggcttagtagatttaaataaccaaattaaagaggttgttggccatagttatagcttcgtcgatgtgatgattatctttttacgtgaaggactagaagtgttattaattgtaatgacattgactactatgacgcgtaatgtcaaagataagaagggtactgcaagtgtgattggtggtgcaattgccggacttgtattgagtatcgttttagaaattacattcgtagaaacactagggaatagcggtatgcttcgtgagagtatggaagcgggattaggtatcgttgcggtcatattaatgtttatcgttggtgtttggatgcataaacgttcgaatgcgaaacgctggaatgatatgattaaaaatatgtatgccaatgcgattagtaatggtaatttggtattgttagcgacgattggtttaatatctgtgttgcgtgaaggtgttgaggttatcattttctatatgggaatgataggcgaattagcgaccaaagattttgtcataggtattgccttggccattgtgatattaattgtctttgcgctattatttagatttatcgtcagattgatacctatattctatatatttagagtattgtcgatttttatttttattatgggattcaaaatgcttggcgtaagtattcaaaagttacaattattaggtgcgatgccaagacatgttattgaaggattcccaacgattaactggttaggattctatccaagttatgaaccattgatagcacaagctgcctatattatggtagttgctatcttaatctttaaatttaaaaataaaaaacaggccgtgtgcctgtttttttgttgctgcattgcggattatcttagcattgcagatatcgcggcattgttgaggtgcggatatcactgcattgttggttctcgttgcattgcggatatcacggtgtaatccgatgctgtattctgattaacgcaatgttagttagctgcagtattgatataatctgaggtgctacattgttcttttattggctattgtgatgttattgcattgtgagtattgcagtattgattcgtataaggtcattgcgttggtggttcactgcggcatgtgaatttaacgatgaacatactgaactcaaagagcaatatgagtggcaatgtgagtaatatatttaatgttatgtctggtggtgcaatgagactcgccagcacaaagcaagcaaaataaatatatttacgataatgtttcaaagaatatgtatctataagaccgaattttgcaagacccataaataatattggtaattgaaatagaatgccaaatgtgaataaccaacgtatgagttcaatcaaatatgctttaaagccaatgactggcgaaatgtttaaagttaatgataattttaacgcgaattgaataatcattggaaagccaacataaaatgcaaaagcgacgccagcacagaataataacacgctaaaaaaactatatttataaataaattgacgttcattattatgtaatccaggtgcaatgaatgcccacaattgataaaacatgactggtgaaatgaaacaaaacgtgatgaaaaatataatcatcacgtatatttggatcatttctgtgaatgaaaatgcatgtaaggacacatgtgcacgggtaatatacgttatgaatggtgtcatccaccaaaatgatgaaacatatacgacgatgaccgtaatgacgaacgacaataaaatttttactaaccgatggcgtagttcgctaaagtgaaccattaatgtatcatcagtactattgctctcgctgttgcttcgattccttactgggtgtatcgtgagactctttatctaaatcttctgttgcagatttaaattcttttaaagtagaaccgatagcacgaccaaattgtggtaattttttcggaccaaaaataattaaagcgataatgctaatgacgacaagacttgttggacctgtgatgcctaaaataaaagtgttagttatcatgataatcaacctcactcataagtagtatatagtatttactttataccgaacgataatgattatcaacaaattttatataataattaaaatattgctataaacacaacttactgaggtattaattctgaaataatagcttgttcttttaagtcgatataagtacaagtaccagcttgaatatcgatatgccatttataaatgccagcttcagccatttcatcacaaaatgtttcgaaatctgtttgtccttgttgatgtctagttaatacatcttgaacgatagattgatttgatcttggagcgacaggatgattactttttacagatgatgtaacgatatcatcttctgattgatgtacgtatgttgctgtgccatcttgaatattaacaatattgtacgtcatacccatatccttaaatgctttgaatagttttggaaaatcaacaccagtaaattgttgatgtgcttgttggattgcagataatgtaaatgccataatagtctcctttgaatggtttgatttagtgaaaatgtgtgcatcatactaaaattagaatgctgttaattatgcaggaaggtgtaacgaaagtaaacaattatgacttgtaggcgttgaggtgtttgtttcaaaatgtcatacataggtggacatttatattttttttgtgtagttttgacaaatatagttgtcaaaaagacgcatatcatttacagtgtaattaaggagttgatgcgatgtgcgtaatcgattgaaagaattacgagcacgagatggcttaaaccaaacgcagcttgctaaacaagcgggtgtttcaagacaaaccatatcgctaattgagcgaaataactttatgccatcggtattaactgcaataaagattgctcgtatcttcaatgaaaaggtggaaactatttttattattgaggaggatgaggtatgaaaatactaagatatatcggatatcttttactaggtggacttgtaggtggtatcataggtggaattttaggtaactttgatggattgggtattgagaatttgacgttcgcaacgcgtaacaatgtcgttgtaatatcaattattgcgactatgatcatcatattaatagaaatcattgttttgatgaatcaaagacgtgcattgaagtataagcgacttgtagatgaagaggtagataacgaagaaacagatcaatatgaattgcttgcgaatcgtcatgttttaaatggaagtatattaagtattctacagacagttattgccttgttagtgttgcttatttttgtggtaggacaagctgaagcaaatggaatactattctttttaataccattttttgctagtgctattttcaatacacaatttacactgtttaatagaagatttgatgacagaatgccaaaaattgcagataagaattacactgaaaagcgattggaaatattggatgaaggtgaacgccatatagaattaatagcattatttaaaacatatgcaatcaacttatcaatattgatactagccattgtagtaattgggctttattcaattactactggaattaatcaaagtttcagtttgctacttatcattgctattttcatatataacgcctttagttatttattgaagagtagacgtttttattaaaattaaacaaagaggagcatggatatgacaacattgttaaacgtagatcgtgtgaacaaacaatacaaagattcggaatttaaattacaagatgcatctttaacgatttctaccaatgagacagtaggattaatcgggaaaaatggctcaggtaaatcgacattaattaatattctagtaggcaatcgacataaagataacggtagtatcacattttttggggaagagcatgctgcgggtgatgtcgaatataaagaacacataggtgttgtgtttgatgatttgagagtacctaataaattgactattaaagatatagataaagtatttcaatctatttatacgacttggaatagtcaaaaattctttgatttaatcaaatatttcgagttgccactacaaactaaaattaaaactttttcaagagggatgcgaatgaagatagctttgacgattgcgctttctcatgatgtgaagctattgatcttagatgaagcaactgcgggtatggatgtttctggacgagaagaagtaatggaactattagaagattttgtcgcgcaaggtggaggcatcttaatatcatcgcatatttctgaagatatagaacaattagcggataaattagtgtttatgaaagatggacgaatgattttaactgaacagaaagatagacttttagcacaatatggaattgttacgacagaagatgaagatgttgaaattcctaagcatttaattatagcttctagattgtcaaaggggaaatatcaaattttagttaaagattatgcagaagttgaaaatgcagaacctttaaaacacattgatgacgctacgaaaatcataatgcgaggtgaagtataatgaaaggtatgttcctaagtagtttttatgcaacgagaaagcaaacatatatttattttatagtcgctatcatagctgcgggatactttgcagtatttaatccgttgatgagttcggcaatggccggggttatgttaatcacacctattactgataatattaaacatgaaaaagactcaagatggatgtattatgtatctactttaccggttaaacgtagtgattatattaagtcatactttgccttttatttaatcttattcggtgcaagtttaatgattggattagttgtgactacgattgtgacccaaagtgtgatgattggtattatgtcaggtttaatgagttttggtatcataggggcatactctatcattttcccattgacatttaaatttggcgctgaaaactccaatgtcattatgatatgtgcatctatactactacttatttctttcgtggtctttttctttatatatggtatggttagtggtgcatctgcattagaatttgaaaaaattagcactggaggatggctagttgtcatagtatatgcggtcattggtatagttataacgagcgtttcttatatattgtctattaaaatttttaacaaacaagaactataatcaatattcttggtgtgaagctagtcattgaaataatatttagagcaggtgataaatcaatacgattatcatctgctctttttgttgttgtggaatgaaatgtgggatgaaaggttgagatgacatctctatatcatatcatttgtttttagaagattaggttgtgtgggaattgcatccttttatagtggggattagaggatatatgttatttataagtatcatttgatgattgtataggctaacgatttcctcggaaatatttaaaaacctcgatcatgtagcataactgaagtttgtcacaaagtataatgtgaagttcgacacttttggattcagttcaaatactttgaccgaggtaaatactatttattcatgtttattacgtagacgttgatttttaaaataaatcagcatgatgcagaaggttgcaactgatactgagataatcattacatggtcgtgacctttaaataaaaggctgacaatataagacataacgagtatccctagtgaatatgaaatatacttcgcatttgtcaattcgttatggaaataaggtgtaattaaccataatccaatatagaatactaaaacactgatgtacatcatattaatttcaaataagtcatttagtttattactattactaaaaacaattgctgcattaataacacctaaagcgatattgattaataaatgcgtatacgataaacggaaaccgatagatgacaatttatgattgatgtaattttcagtaatgatccaataaacaccgaaaagactaattaaaatcataaattggaatatataaatgtaactaaaacgttcaatactaaatgatgaagaagctaaaccgacaagcacttcaccaaagatgataattgtcagtaatgaaaaacgttctactaaatgcatcatattaacaggtgataatatgagatacttctggaatggaataagtcctgtcgctgcaatgaatacgcctaaaaatccagggatgtaatggatactttgtggtagtactaatgatagaaatgataagaatgaaatcacaaaagctacggtagcaaaggcttggcatgtacgcttatctccataatctaaaccggtacgtatatgtaacaagtattgtaaaccgatacttagatacataattgcaacgcataagaagaatgggaagaatgttttttcaaagtctggatataaactattagatagaaagaccatgataaacatgttgaacatcataaacgagacatctttaaatgtgacttgaccaaatcgatttgtgaaaaatgtttgatgagaccacattaaccataaaaataaactcatgacgatatatttgaaaaataattcagctgaaatagaaccattttgtgttgttaaaatcacatgtgctattttttgaatcgcataaacgaagattagatcaaagaatagctcatgaaatcctgcacgtttttcagctaaatgttttggcattaatgtattaaccataaaattttaactcctttaagatgtgtaattaatttactaagtatactatttattttttctagtgaataggggtagatttggcgatgaagtggaaggagaggtgactgcaaggtaattgcggaattaacaatcatcagcgatttaatatttgactagagacgtcatggtaagaaaaagttgacgagaaattgatggtgaaaccagatgtgaatagcgatgcaatgatagatagcatttaattagagtcattacgcgaaatgattaatgataatttgtggtaaatcaaagcataattttgtactatagatgaggatgatagagcatatttaagagtgtgaaatgttatagtgaaaccgtttacgtttccgattgcccaaacaaattacatcattgtataatatgatttgttaaatgcataacaagaatgaaaatgtaacatacgtagcaattggtttcataaattggatgttagtggcgtattggttcattagacgtattagtaataaaattgtatatatcataaggagatgaatatgacatgacgaaagtcgtattagcagcagcatacaggacacctattggcgtttttggaggtgcgtttaaagacgtgccagcctatgatttaggtgcgactttaatagaacatattattaaagagacgggtttgaatccaagtgagattaatgaagtcatcatcggtaacgtactacaagcaggacaaggacaaaatccagcacgaattgctgctatgaaaggtggcttgccagaaacagtacctgcatttacagtgaataaagtatgtggttctgggttaaagtcgattcaattagcatatcaatctattgtgactggtgaaaatgacatcgtgctagctggcggtatggagaatatgtctcaatcaccaatgcttgtcaacaacagtcgctttggttttaaaatgggacatcaatcaatggttgatagcatggtatatgatggtttaacagatgtatttaatcaatatcatatgggtattactgctgaaaatttagtagaacaatatggtatttcaagagaagaacaagatacatttgctgtaaactcacaacaaaaagcagtacgtgcacagcaaaatggtgaatttgatagtgaaatagttccagtatcgattcctcaacgtaaaggtgaatcaatcgttgtcactatggatgaaggtgtacgtgaaaatgtatcagttgaaaaattaagtcgcttaagaccagctttcaaaaaagacggtacagttacagcaggtaatgcatcaggaatcaatgatggtgctgcgatgatgttagtcatgtcagaagacaaagctaaagaattaaatatcgaaccattggcagtgcttgatggctttggaagtcatggtgtagatccttctattatgggtattgcaccagttggcgctgttgaaaaggctttgaaacgtagtaaaaaagaattaagcgatattgatgtatttgaattaaatgaagcatttgcagcacaatcattagctgtagatcgcgaattaaaattacctcctgaaaaggtgaatgttaaaggtggcgctattgcattaggacaccctattggtgcatctggtgctagagttttagtgacattattgcatcaactgaatgatgaagtcgaaactggtttaacatcattgtgtattggtggcggtcaagctatcgctgcagttgtatcaaagtataaataataagaaaataggttatcacaacagtattaattacatgttggcataacctgtttttatttgtttatggatttattgggtaatattagtcatttgatggtttaattgcaaatgctctaacagggaacccaggtgcatcttttggtttagggctgatagcgtaaatgatggcgccacgagttggtaattgatctaaattagttaataactcgacttggtatttatcctgaccaagaatataacgttcgccaactaaatcaccattttttacaacgtccacagatgcatcggtatcgaatgtttcatgaccaacagcttcaacacggcgttcttcaattaagtacttcaaagcatctaatccccaacccggtgcatgttgttgtccgttcgaatctttgttttcaaacgtttcaatattaggccaacgttttgaccaatcggtacgaagtgcaacaaaagtgccaggttcaatagtaccatgctctttttcccatgcttctatatgcgcacgtgttacgatgaaatcattgttgttcgctacttctgttgaaaagtctaatacaattaacggcaataccaattcttttaaatcaatgtcttctaaataacgtttgttctcgacaaagtggattggtgcatcaatgtgagtaccatattgcgttacaatattccaacgttgcacatagaaaccatgatctttaaccgtgaataaagttgaaacttcgcctttttcaaactcactaaaacgtggtatttctggatcaaatgtatgcgttaaatcaacccaagttgcttgttttaaagtatttaattgttgccataaaggatattgtgtcataaaatcacccgtttttagtttattatatgataaatgctgcgattattcttggcgtttagctttaacagcattcacaagtacagtcaatgcatctttaacttcttcttcttttcgcgttttcaatccacagtcagggtttacccagaataatgagcggtcgatttgttgtagtgaacgattgattgctgtagtaatttcttcttttgttggaatacgtggactatgaatatcatatacacctagaccaatacctaaatcataattaatatcttcaaagtctttaattaaatcaccatggctacgagatgtttcaattgaaataacatcagcatctaagtcatgaatagcatgaatgatttgaccgaattgagaataacacatatgtgtatggatttgagtttcatcacgaactgaagacgttgcaagtttaaatgataaaacagcatctttaagatattgttcgtgatattcagagcgtaatggtaagccttcacgtaatgcaggttcgtcaacttggataactttgattcctgcagcttcaagtgctaatacttcttcgttgattgctaaagcaatttgatcttgaacaacttcacgtggtaaatcaacacgttcaaatgaccagtttagaattgttacaggtccagttaacatacctttaactggtttatctgttaagctttgtgcataaactgtttcatcaacagttaaaggtgctgtccattttacatcaccataaatgattggtggttttacggcacgtgagccatatgattgcacccaaccgaatttagttactaagaaaccttgtaatttttctccgaagaattcaaccatgtcattacgttcaaattcaccgtgaactaatacatctaagccgatgtcttcttgaattttaatccatcgagcaatttcattttttaagaatgtttcatatgcttcgtctgtaatgcgtttgtttttccaatctgcacggtattttcgaacttcttggctttgtgggaatgatccaatagttgttgttggtaaatccggtaagttcaaacgtttttgttgttgttcaatacgttgcgcgaatggtgattgtcttgaagtacgcacgctttcgaaatcataatctaagtttttgaatgattgattttggaaacgctcataacgtgcttttaatttatcatatttaacactatcgttttgattaaataggcgacgcaatgcatctaattcgtctaatttttcagttgcaaagcttaagccttcgccaacacttgtatctaatgtttcatcatctaaagatactggaacatgtaataatgaagatgatggttgaatgacaagctcattcgtgtgtgctaacaatttatcgattaagacttttttagattcaatgtcacttgcccatacattacgaccatcaataattccagcgtataatgtttttgatttatcaaaatctcctgcttcaatttgtttaaggttatagccattatcatggacaaagtctaaacctaaaccaccaacaggtaaagaacttaagaatttaagatgtgcacgttcgaagtatgtttgaatgactaattttttagcaacaccagctttttcgaaatagtcataagcttcacgtgtaatattttcatagctttcactgtcgtctgtaactaagattggctcatcaacttgaatgtactcagcacctgcatcaattaatgattcaaacacttctttataaagtggtaataacgttttaactttttcttcaaaagtttggtgaccgccttttgataatttaacaaaagttatcggaccaacaatgacagggtgagcgttaacgtttaaagattgagcatatttaaagcgatctaataatacattgcgactcaccttaggctcaacattgtcccattcaggtacgatgtaatgatagttagtgttaaaccattttataagtgcacttgcaacatggtctttattaccgcgagcaatatcaaataataagtcatcatcgatagttctaccttggaaacgttcagggatgatgttgaataataatgacgtatctaaaatatggtcatataaagagaaatcaccaactgggatgctatctaagtgatagtacttttgtaataataaattttctttatgtagatcagttaatgtttgatctaattcttctttagaaatcttctttgcccaataactttcgatggcttttttccattctctttttctacctaatcttgggaatcctaagtttgatgttttaattgttgtcataatattgcctccttgtgagcagtaatagattttgagtatgctgcaagttctaatgaatcttcgacattttgaaacggtgtgataatgtataaaccattaaaatattcatgaacagtatcgattaaatcctttgaaagcttaagacttagttcgcgtgttttggctttatcatctttaactgcttcaaattgttgtaaaatttcatctgacatcttgattcctggcacttcattatgcaaaaagagtgcgtttttgtaacttgcgataggcataatgcctatgaaaaatggtttgttcaagtgcttagtggcatggtaaatttcaatgattttctctttgctgtacacgggttgtgttataaaataagacattccgctttctatctttttctctagtcgttttacggcaccatctaatttacgaacattagggttaaaggcgccagcgatgttgaagtgtgtacgtttcttcagcgcatcaccgtcagtgttaataccttgattaaatcttagagcgagttcagttaatcctttagaattaacatcatagacattggtcgcacctggtaagtgaccaacttttgaaggatcaccagttatggctaatatttcgttaacgccaatgagcgataatccaagtaaatgggactgcaagccgattaagtttcggtctcgacatgtaatatgtacgagtggttcaatattgtaatattgtttaattaagcttgcagcagcaatgttgctaattctgacagttgccaatgaattatctgcgagtgttaccgcatctacattagctttatcaagtttagcgatattttcaaaaaatctatccgtgtctaaatgtttcggtgtatccaattcgataataacggttggacgttcttgaaccttagatgttaatgattgtctaactttattttgagatggattgaaaagtgctttcgttggtatcggaatcacttttttatcattaacaggtttaagtgtctgaatagattctttaataaatttgatgtgctcaggcgttgtaccacagcaaccaccaattaaacgaacaccttcgcgaattagattttgagcaacttgaccgaaatattgtgcattgtcactatacttaaattcactattttcaatatctaataagctggcatttggataacaagataagtatgcgtgctctggtaattcaatatgtgtgaaagactcttgcatatggtgcgggccatgatgacaattgagtcccacgatgtttgcaccacattgaacgagttgttttaatccttcattgattgcctgaccattaactaagtaatttgtgtttgaagcggttaattgagcgatgattggaatgtcgtatttctttttcgttcgtgaaatgacatttgttagctcttctaggtcgtaatacgtttcgaaaagtagcgcgtcaacgccttcttcaattaaggtatctatttgaatttcagtatgataaagaatagtttgtaagctgatatcctcttgtttgatacctctaaacccaccaactgtgcctaatatatacgtatctttatttgctgctttttttgcgatgcgtacggctgcttgatgtatagctttaactttatcttcaagaccgaatcgttttaacttttcaaaatttgcaccataagtattggtttgaatgacatcagcaccagcttcgatatatgaacgatggatgcgttcaactttatctggatggctaagattatatgcttctgggcaggtgtctaacccttcagagtataaaatggttccaatagcgccatcagctactaaaacattatctttcaattgtgtgaggaattgactcattgaatgcctcctttaatgcgtatttgatgtctgcaatgagttcatcagaatcttcgagaccaacgcttaatcggaatagaccgaaagtgataccacgttcttgtctcacttcttcaggtagtgcagcgtgagacattgttgctggatgtgaaaggatcgtttcaacaccgcccagactcactgaaacgagtggtaatgtcagtgcatcgacaaattgttgtgctttagactcatcagctaaacgaaagccaataacggcaccgccatttttagcttgttctaaatgagcagcagtgagtcccggataataaacttctgaaatttcatcttgctttattaaaaatgacacgattttttgagcgttttcgacagattgtttaaatctgattggaaatgtttttaaatgtttagcaagcgtccagctatcttgagcagataacatattgcctgtaccattttgtattaaataaagagcttcactaattgcctcattattagtaatgacagcaccagcaattaaatcgctatgtccacttaaaaattttgtagcactatgaatgacaatatcagcgccaagtaataaaggtgattgacctaatggtgtcataaatgtattgtccacagctaccagtagttcatgcttttcggctattttagaaacagctttgatatcagtaattttaaaacagggattcgatggtgtttcgatataaattaattttgtgtttgattgaatggcaccttcgatttgttcgagcttggtagtatctacggttgtaaattcaatattaaaacgattcaaaatttgctcagtgaggcgaaaagtaccgccatatacatcatcgggtaagatgacatgatcaccagatttgaaagtcaaaagtactgctgaaatagcagcaatacctgatgcaaaagcaaaagcgaattttccctgttctaatcgtgctaacttctcttctaaaagttcacggttagggttgccacttcgtgcataatcatatttaacatcgccaccaagacttgtttgatggaatgttgaagaatcatagagtggtgggttagctgaatgatattccacacctctacgccaatcgaatatcacttctgtctcttttgaaagtgtcatacaatctctccaatctgagctttatctaatgcttggatgatatcgcgttcgatgtcttcataattttcaacgcctagtgataagcggattaaatactcatcaatgccacgtttatctttttcagcatctggcatatcaacatgtgtttgtgtgtaagggaaggtcactaatgtttcagtacctcctaaactttctgcaaaaatacaaatgtctaaattttctaataatttagcaacgctataggccttgttaagtcttaaactaagcatgccagtttgcccgctatatagtacttcgtcaattgcttgaagtgactgacattttttagcaagttttcttgcgtttgattgcgcacgctcaatgcgtaaatgcaaagttttaagtccacgtaacaacaaataactatctattggtgaaagtgttgcgccagtcatgttgtgaaaatcaaacaactgttgcgcgagtgattcatctttgacggttacgacacctgctagtacatcgttatgtccaccaatatatttcgtagctgaatgtaagactatatcagcaccttctgctaatggtgttgaaagataaggtgttaaaaaagtattgtcgataattgacaataagcctttagctttacaaagttgatagtacggctttacatcaatagcaatcatttgtgggttagatattggttcaatgaataatgcaactgttttatcagtgatttctttttcaacttgttcataatctgtaaaatcaacgtacttaaatttgatatcgtattgttgctcgtaaaattcaaataatctaaatgtgccgccgtataaatcgaatgaaactaaaatttcatcgtgtggtttaaataaattacatattaattgaatggctgacattccacttgatgtagcgaatgatgcaataccatgttcgagtttggcaaaacaggtttcaaatgttgagcgtgtaggatttttagtacgtgtataatcaaaacctgtcgattgtcctagttttggatgcttgtaggcagtagataaatggattggattcgctatagcaccggttgaatcatcagttaatgtgatttgggctaactgtgtatccttcatattaagaccctcctgtaagaaaaaataaaaagcttccgtccttcgtacccgaatgaatcggataaaaaggacgaaagcttatgtttcgcggtaccacctttatttgttattccatcgctgaaataaccttattcagtacgcattaaaagtaaatatgcttactgaacaattatcacaattaaagtcagtaagtaaggatatagtaatgtgatatcccatacttattaacaaaaaatcgtgcgtaaagaatccagtacgccatttaacatcaatgttaatactgtatcgctataacgggcgaacccgtagacacctcatattggcatcaacactccaaggccattttcaaacacgctttcaaaatcttctctcagctactaaagactctctgtataagcagggtgtgttttactttcctctttgttgtgtttacgtttcattaaactgttataagatattaattagcttacagagtaaaaaaagatttgtcaacaattattcagaaaattttgatttaaaagttaatttgtttgtgaaattgtaattggtatcttgaagttgaaaaatgaattattttttaaataaagtgtggttaatggttgtctgactcatttagaatacataaaatatatttaactgttgttatcaaataaaaagtgatgtgagtgaattgtcaaaaagtgaagatcaacgtattactaaaacaaaagatgaacaaattaagcaaatagatatatcggatatcaaaccgaatccgtatcagccccgaaaaactttcgatgaaaatcatttaaatgatttggcagattcaattaagcaatatggtattttgcaaccaattgtgcttagaaaaacagttcaaggttattacattgtagttggtgaaagaaggtttagagcttcgaaaattgctggtttaaaatacgtatcagcgattatcaaagatttaacagatgaagatatgatggaactggcggtcatcgaaaatttacaacgagaagacttaaatgcgatagaagaagctgaaagttatcaacgtttgatgacagatttgaaaattacacaacaagaagtagcgaagcgattgagtaagtcgcgcccgtatatagcgaatatgttgaggttattacatttaccgaaaaaggttgctgacatggtaaaagatgggcgactgacaagtgcacatggacgaacgttattggcaattaaagatgaacaacaaatgcttaggttagcgaaacgggttgttaaagaaaagtggagtgttagatatttagaaaatcatgttaatgaattaaaaaatgtttcgtcaaagtcggaaacagacaaagtagatataactaagcctaaatttataaagcaacaagaacgacagttgcgagaacagtatggcgcaaaagtagatatatcgataaaaaaatcagtcggcaaaatctcatttgagtttgaatcacaagatgactttgtgagaatcattgaacaattaaatcgtaagtatggtaaatagttacacaattttatataatatcactttgtgaatctatagatatatcgatagttatctatattctttgaagatgatgcgacttcagtaggttggaagaatacaacaatattaataaaattatttgagactatatagaagggagtaacgctaattatggatcaagttatgagtattatttcatcgctattcgaaccattaactaaaattgaaacatatgaaagtgtcgctactaaattagcgatgataattatatatattatcgttgcattaatcgtaattaaaatactagataaaatgattgctcaaggatttaaaatacaaaacaagagtaaaaagggtaataaaaaacgttcgaaaacattaatatcattggtgcaaaatgttgttaaatatatcgtgtggtttatagttatcactaccattttaagtaaatttggcattagtgttgaaggggtaattgccagtgctggtgtcgtaggcttagcagtaggttttggtgctcaaactatagttaaagacgtaattacaggattctttattatatttgaaagccaatttgatgtaggtgattatgttaagataaataacggtggtacaactgtagcagagggaacagttaaatcaattggactccgttcaacacgtattaatacaatatctggggaacttacaatcttgccaaatagtagcatgggtgaaataacgaattactcaattacgaatggaacagcaattgttaaaattccagtatctgtagatgaaaatattgataatgttgagaagaaattaaacaaattatttacatctctgcgtagtaaatattatttatttgtaagtgatcctgttgtgattggtattgatgcctttgaagatgctagagtaatattaagggtttcagcagaaacaataccaggtgaaggtttctctggtgcgcgtattattcgtaaagaagtacaaaaaatgtttttacaagaaggtattaagacaccacaaccaataatgacaccttttaatcatagtgaaaacggtgtttagtagtttataatacatggaggtcatatttaatggcgtcaaaatatggaataaatgatatagtagaaatgaaaaagcaacatgcgtgtggaacaaatcgttttaaaattattagaatgggtgctgacattagaattaagtgtgaaaattgtcaacgaagcattatgattccacgtcaaacgtttgataaaaaactaaaaaaaatcatcgtatctcatgatgatacacaaagataggagaatgattcatggctttaacagcaggtatcgttggcttaccaaacgttggtaaatcaacattatttaatgcaattacaaaggcgggtgccttggcagcaaactatccgttcgcaactatagacccaaacgtgggtattgtagaagtgccagatgcaagactacttaaattagaagaaatggttcaacctaaaaaaacattacctactacatttgaatttacagatattgccggaattgttaaaggtgcttctaaaggtgaaggtttaggtaataaattcttatcacatattagagaagtagatgcaatttgtcaggttgttcgtgcttttgacgatgataatgtaacacatgtagctggtcgagttgatccaattgatgacatcgaagttatcaatatggaattagtacttgcagacatagaatcagttgaaaaacgcttacctagaattgaaaaattggcacgtcaaaaagataagactgctgaaatggaagtgcgtattttaacaactattaaagaagctttagaaaatggtaaacccgctcgtagtattgactttaatgaagaagatcaaaaatgggtgaatcaagcgcaattactgacttctaaaaaaatgctttatatcgctaatgttggtgaagatgaaattggtgatgatgataatgataaagtaaaagcgattcgtgaatatgcagcgcaagaagactctgaagtgattgttattagtgcaaaaattgaagaagaaattgctacattagatgatgaagataaagaaatgttcttagaagatttaggtatcgaagaaccaggattagatcgattaattagaacaacttatgaattattaggattatcaacatattttactgctggtgtgcaagaagtacgtgcttggacgtttaaacaaggtatgactgcacctcaatgtgctggtatcattcatactgattttgaacgtggatttatccgtgccgaagtaacaagttatgacgactatgtacaatatggcggcgaaagtggcgctaaagaagcgggcagacaacgattagaaggtaaagaatatattatgcaagatggcgatatcgttcatttcagatttaatgtataaacgatagagtcaagttaattaaatagtatatatgtagaagaggcggaatcaattgttcgcctcttttaattatacgtataatttattaaaagaatggaataattttactcgcgttaataatatcttgagtgctgaaaaattgtttgccttcgccagtataagcaggctctaaaacaagattagcctttgcacaataaagccattcaggatgaatgccactattaagtatctcttggaattcttgaaaatctttagaccaatcaatatttaaattcattccttaccacctcacagttattatagaacatgcgttcgcttttgtgaagtgtatttttaaaaatatcatagaaaatttcaaatgaattaatgtcaaaaatgatatgaagagtagtttgaattattattgtaaaaagtaatggcgcatgatataattctttattgtgagtaatgaaaattattccttgcttatctgttttaagattgataagccgtatagaccacaaggaggtgcaaatataaaatgagaacatatgaagttatgtacatcgtacgcccaaacattgaggaagatgctaaaaaagcgttagttgaacgtttcaacggtatcttagctactgaaggtgcagaagttttagaagcaaaagactggggtaaacgtcgcctagcttatgaaatcaatgatttcaaagatggcttctacaacatcgtacgtgttaaatctgataacaacaaagctactgacgaattccaacgtctagctaaaatcagtgacgatatcattcgttacatggttattcgtgaagacgaagacaagtaataattagagggggcgtttaaatgctaaatagagttgtattagtaggtcgtttaacgaaagatccggaatacagaaccactccctcaggtgtgagtgtagcgacattcactcttgcagtaaatcgtacgttcacgaatgctcaaggggagcgcgaagcagattttattaactgtgttgtttttagaagacaagcagataatgtaaataactatttatctaaaggtagtttagctggtgtagatggtcgcttacaatcccgtaattatgaaaatcaagaaggtcgtcgtgtgtttgttactgaagttgtgtgtgatagtgttcaattccttgaacctaaaaatgcgcaacaaaatggtggccaacgtcaacaaaatgaattccaagattacggtcaaggattcggtggtcaacaatcaggacaaaacaattcgtacaataattcatcaaacacgaaacaatctgataatccatttgcaaatgcaaacggaccgattgatataagtgatgatgacttaccattctaataaaaattaacgaaattaaagcgaaaaaattatcaaaggaggcacacaatcatggcaggtggaccaagaagaggcggacgtcgtcgtaaaaaagtatgctatttcacagcaaatggtattacacatatcgactacaaagacactgaattattaaaacgttttatctcagaacgcggtaaaattttaccacgtcgtgtaactggtacttcagctaaatatcaacgtatgttgactacagctatcaaacgttctcgtcatatggcattattaccatatgttaaagaagaacaataatatataatttattgtcaaaccccgtaggcataggcttacggggctttttgtgttttgggatatagaaaaagggcaaaaagggcaaaaaaggatggtgtgaatgttttgtgttcggaatttgcacaaagatatgtttatattgcaaaaataatatgaatttagatgcataaaaaaagaactacgcattttaaataaatgcatagctcttctttttcttgcatacgaattaaaataactcgcgagacctataagtctctttcctcactagatagtttatacttttggtctgttgaagtcaataattttatctaaagctataaaaaatcttttgatagctaatgcattattataatagctttcgtttcttttatatcgcttttgaagttggtccaaatcgtgatatcttgcttggataattgcattactacaaacttgattatgtaattctagcgtagcgaaagtatctatgaaattttttattccgaacatgtttctagatatacctatattattccctttttcaaataaatattgaggagatctactgtcataatttagatttgctatgatgggttggttatgagctgatttgtttcttatatttttaactaaaggcattaaaatattagcaactctcaattcttcgtcattgtacttcttgtaatagaagttgagaaacgaaacgaattgacctagttgcatgaattcaatgcaaacccatgcgggtggattttgatagtatttattcaacttctcgggtagttgccctcttttattcatatgcttgaatatttcgtttttatttttgattttggtttccataacttcttctggtgttcttggatttgtgtcaaaatttgaattgttatatgatttatcaatacataaaaactcatctattattttataaccatcttcttggttattttctgttattagttttaagactagacactttaaactatgttcaatatctaaagttatatgcaacattgtgtatcttaatttcatatctatagttgctaaatctgataaataagcaaattctatgaaatagccgccattctttttttcgaaattttttcggaaataagctagtttgaagaagtaattattttttctaagaatttcatttgctttttcggtgtcaataatattaaaaaatatattcatctgttttaatttcgctatttgctcatcaaaattgagcataggcttaatttctgctagtgtatcatctttttccaatattaactccccaatcgttcaaatttattcatcatatctttcgccatctgattagtaacatgtgtgtatatctctagatttttttataatcagaatgacctacatgctcttgcattgcttttaagttaattcctaattgagcaagtgtagatatatgcgaatgatgtaatgtatgcgtcgttacaggtttcttaatagaactaatctcagttgtctctttgatagtgccccctttaataatgttatttattttgtttaagtcgataggaccaccagctacatttgtgaatatgtaccctatattaataaacttatcattccaagcataagtgttcttagtatgttgatgctttggatagtgagccctatggccctatagctattacttctttcagttgtctcctttactccgaatgctcccgtctttttttcagttatccaattaattgtaccatcgatatctagcgttttatcttcatagtttatattttctctctttattgcaagtagctcaccgatacgcatgccattagcaatttgaaactgtaccatagcttttaccactttataattacgttttgtcgttgggtatttttatacttaattacatagtcgaaacaatccggtatttctttcactacattatcttctaaagtgttattacgttcagctagtaacgcatcactatagggatatctattttatctattacacatataactttgaattgcttactattataaattaataaattctattctcttagatttagtccaattatgtgtaaacgatttatagttattaaattcagagtggtagcaaattaaagttaatcaagagttaagatgaatttaattcatgaacacgtctattatttttataattgtagcaaataaagctttacatcaaggaggtagttaaatatgttcaaaaaacatcattcgaaaaattcaatcgtattaaaatctattctatcgctaggtatcatctatgggggaacatttggaatatatccaaaagcagacgcgtcaacacaaaattcctcaagtgtacaagataaacaattccaaaaagttgaagaagtaccaaataattcggaaaaagctttggttaaaaaactgtacgatagatacagtaaaaatacaataaacggaaaatctaataaatctaggaattgggtttattcagagagacctttaaatggaaatcaagttcgcatacatttagaaggtacatacacagttgctggcagagtgtatacacctaagaggaacattactcttaataaagaagttgtcactttaaaagaattggatcatatcataagatttgctcatatttcttatggcttatatatgggagaacatttgcctaaaggtaacattgtcataaatacaaagaatggcggtaaatatacattagagtcgcacaaagagttacaaaagaatagggaaaatgtagaaattaatactgatgatataaaaaatgtaactttcgaacttgtgaaaagtgttaatgacattgaacaagtttgaaattaagttaaattagtatatacagtgttttatcgctaatactttgaaagttaggtatctaaaggtgcctagctttctttgttatgattagcaccatcatatagaaaattctttaatgacgtttatgccgaaatctacaaaaataatttctcttttatggttaatcagtatgtttttacattcgacaaccttaaaattaacttctttcaattcaataataaagtcactataaagtaacttagtttaaaaacgattcgtatctttcagattcaaataccatcattttctcctaagacttacattttaattacaattatgtaagttgttttcagagacatcctattttatattttgtcagaggtgatcttttgaaaacgattttaaaaacaataacatatcttgcacttactatcattggcgcttatgctgctttattcattttaaaaacaatagactctcatggtataacagatcaatttaacccattagtaaaggaagatgattcttatgttaaaacgacagaggtgtctactagaatggatgatcaactccgaagttatagtcaaagtgcttttaataaagaagggaaagagacgcaattaatgtatactgctacatttgatgttaaaccgcatagatacttgaaaattacacataaaggtcatcatgtagaaacttttgaagaagttgaaaaggaagaagtaccaaagaaagcattagccaaattgaggcgataataacgggtttatattccatggttcattttaaagatgagtacgaaatgaagtgacacatgaagagtaatttaaaaatatttgtaataattatgaatagaattaaaaacaaggggtaatacaatctatatagcatataagcttttgttatgagtttcaaaaaaaggaagagagagtgatattatgaaattaaaatcattagcagtgttatcaatgtcagcggtggtgcttactgcatgtggcaatgatactccaaaagatgaaacaaaatcaacagagtcaaatactaatcaagacactaatacaacaaaagatgttattgcattaaaagatgttaaaacaagcccagaagatgctgtgaaaaaagctgaagaaacttacaaaggccaaaagttgaaaggaatttcatttgaaaattctaatggtgaatgggcttataaagtgacgcaacaaaaatctggtgaagagtcagaagtacttgttgctgataaaaataaaaaagtgattaacaaaaagactgaaaaagaagatacagtgaatgaaaatgataactttaaatatagcgatgctatagattacaaaaaagccattaaagaaggacaaaaagaatttgatggtgatattaaagaatggtcacttgaaaaagatgatggcaaacttgtttacaatatcgatttgaaaaaaggtaataaaaaacaagaagttactgttgatgctaaaaacggtaaagtattaaagagtgagcaagatcactaaaatatgtcgtaatactaatgataataacatgtcttaattcatattaattattaaaataccctcacaacgcaatgtaatatatccagtatagatttgaaaggatatatgcctaacgtgttgtgagggtttaattgcatctatttatccatgcgaatatcgacttcttctaaatgtttctgatattctttaaccttactttctaaaaacatttcatatggtgcatcaaagaagtcagctaaatgcatggcatctttaaatttaggttcatggtgatgattctcccattcccaaatttgatgtgcttcatatttagtaccatatttctcatttaattgttgtgctaattcgtcaatttctaaattatgtttagttcgtaagttatataaaatatgcatattcattgttcattaacctcgcttcttgatttaaaattcaaagatgctctaataatatgtgtatattctagtcctataacataaaataatcaagctatgaattcgccagaaaaaataatgtatttgatattgccggtacagagactttaaataacgatagctacattgaataaaattgatattcaattactactttgaaaaatatttagataaaaataatttgaatttgttttagaaagtctaataacgggtactacttagaataactcaaaataaatagaaaaaggagactgaaaattatgtttggatttattggaatgttaattgtcggtggcttaattggatgggctgctggtgctattatgggtaaagatatcccaggtggtattttaggtaatattatcgcaggtattattggatcatggttaggtggaacattattaggacattggggtcctgaactaggaagtatttacatcttaccagctttaattggttcaattatcttaattgcactggtaactttaattttaagagctgttcgtaaaaaataaaatattcaacttaggttgaattgaaataaagatggcattcagttgtcatcttttttatttgcgtgaaaatggtcaatatgtattataatatttgaaaatgtaggtaagataggattgaaaagtaataaattaacatgaggaaattttggaaataaaaaagcgagtatttgacaaataaaaaaaaggatgacgttgggttgcgccatccaggagtattatgttcatgaatataaaagactgtgtagtcatttaagaactacacccatatagtaacacatcacttgattaaagacaatactatttttagagtcattaatttaaaatatgaattaattatttttttagaatagaatattgagattgatatcgaattagtagtcaaagtgttatggtagatatgaaatacataaggtaaggagtaatattatgacgatttatttagttagacatggcgaatcaaaatcgaattatgataataaacattttagatcttatttttgtggacaattagatgtgccgttaacggatactggcacaaaaagcgcagacgatttatgtgattattttaaagagaaacagattaaacatgtgtatgtttcagacttattaagaacacagcaaacgtttgagcatatttttccatatgacattgcatcaacgactacgcctctattaagagaacgttcacttggcgtatttgagggtgaatataaagatgaaatcagtgcgaatccgaaatatgaaaaatattttaatgatccaaactttagagactttcgtcatagtttttcacaaaaagcgcctgaaggagaaagttatgaagatgtatatcaacgcgtagaacattttatgaatcatgttgtcaatgaagatacacaaaaagatgatattgttattgttgcacatcaagttgtcattcgttgtttaatggtttattttaataacgtttcacgggaagaagctgtggatttaaaagttgaaaattgcaaaccatatatcattgaatagaagtatagaggttctgaaaagctgtgttttatagcggccttcagaaccttttttgcatttggaatttaatgggaatcattcttatcaacagacttatcaccaatagctaatgtgataattgcgcttacgaacaaaataattgaagttataaatgacgctaatgtaaaaggtgtaaattgtgtgagcgataatatcaatgataaaaagaaccaagagatagcccctagaaattgtaaaatagcagaagaaattctaaaactcatataatcatatatagctaaaacaagtgaaggtaatgcgactaataccattataatgatgttgagggtgaataaatatggctgttcaaaagttactgtgtttggtcctgttggatgcattgctgctaagaacaagcaaacaatcgtcgataaaattgctaaaataataaaagtaattcgaactttcatcatgaccatcctttgtttatagagtcaatataagtatggaatatgttagggatatagtcaaatgcgtcaattaatggggattttaggatggatagagaatttaaaaccaataaaaaaacaggctgggacataaatcaatgttctatgctctacgaagttatattggcagtagttgactgaacgaaaatgcgcttgtaacaagcttttttcaattctagtcaaccttgccggggtgggacgacgaaataaattttgcgaaaatatcatttctgtcccactcccaaaatggtatggtattggttaaaatgtattgtctcaatgattagtcacttttaaagataaagaattgtcatgaattaaagcgcatgtaatgatgtgttacatgtcgcaatgatggctttcagttatttatcgataacatcactcttgatacctttagattttaagaaatctttaattttatcttgttgctttttattaacatcaccggcatattttgttggcacgtcgactacattgattttattttgcggttgatagctaagcttttcaatatcttcatcaacattggcgattgtactatttaaagctttgaagtaattcatcattaattcaacgggtttcttatattctttaggaatattgttttcagtgacaaatttcttgaaatgcaaatcatttttaacagctaagttagataagtgactaagtgtttctgcttgtttttcagtcacttttgtttgactgtcaatttgtttatctagtttatgttgcattatatatttgttatcaagtatatcgctatttacagacaaatacttttctatagcttgcttcatctctgcatcactaatatcactatttttcttatctgagttaaagatatcttttgtttctaattttttagcgcttttaggtgcatggatgccagtacttgtgtgatgatcttcgttatcagattgatcggacgcgcaacctgtaagaattaatgtcgatgctaaaaatgtacttagtagtaatctctttttcataatgtaatataactccttagtttatctttaattgaaaaaatgtgtattcatgtttaatagagtaatgttgaattagtgtggaatgttacgatgaccttgcaatgaccatagacgtaaatgattacgtgcatgagttgctttttctatcaataatgcgtcgttttgtacgttgttaaggatagcattatctataaataactgcataattggttgtactaatttagacgtaggtatcgtacgtaaaagcataatgatttcattcacatacttttccttttcaatatcatttttcatattgatttgtttgcgtagataacttgtgaacgctttaatttctgaatcagatttcaaatagtggtgtctatcataatagattaattcctcaacagaagctggtacatagtatccttcatcagaaatatcaatgcctgacgcctcagactcgacaacatcaaataacacagggtgaaacacgaagtcatcttcaatataatatagctcagtaccagctaaagtatctaagctatattgcaactcttctttactaaaagtagcgtcataaaatctttgtgtgagatatagtagatgattagttgataaaataccatacaagtttacagaaccaagtataatacgaagaggtaaaatatcttttttatctattaatcctttcttaatctcagaaatcaattgagtgattgcatcacttcttaagctatcggttgtaccaaaatcttcaaagtcatcatctttaagtaacatatctaagtcaacttcgtcgtccataaatgataactctaatgcgttttcaaactctgctaaacttttctcaattgtttgctcatcaacaaactgatttacagctttctcaaaatcaccattgccgacttgattcacgaaattttcaatatgtttacgcacatcatttggcaaaataagacaatcatattcaaagtcgtaataataataaaaatgactagttaaaaagttgtcaaaatttattaattgtaacttttcaaattcaattagttcattgtttaatcggtagttagcatcactttcaagtatgctagaaagaatgtcaaactcaaatagagtagtattagaaaacacttgttcaatgatgtgattattattgaaaaatgctgtcataattaattcaacaagattttgtttgtttttatttgagaatcctttgataccatactgcctgcatattgtttttagctcatcattagtttttaacattaaagcatgttctaatgtgacatcgtttaagcgcgtatgctgtcttacacgaaaggcttcttcatttaaattcatatggtttattgtatctaacgattcgaattcaccatatgcattatctagtacctctgaattgatatatcttaaaaagaaattatttacaaagaactcatcttcgttaagttgataaacaaaacctaggtgatttgttagctttaaaatattaacatcacggctatttacgattgtgacagggttacccttagatataagtgtttctataaatctttgttctgtcttatccatatcatgataaattttatgtatactttcagggcgtaaagcatgaatcgtgacttcaaatccttctttttgggtcggtaaattaaaatattcgcatgcattttgtaattttcctgggtatataaaatgaacatcaagcatttttgcacacctcgttgtatatattaagtttatcataacatgattttatgtcgggataaaaaaataacagcatcttaacaaatgtaagatactgtcagtggaatgaatgaaactttagtttctgataatatagtcaaaggcatttaatgctgcatttgcaccagcgcccattgaaatgataatttgtttgttcttctgatctgtgacatcgccagcagcaaatattccaggaacattcgtattattgttacgatcaatcacaatttcaccacgttcgtttaattcaacagcatcgtttaaccatgatgtgtttggaagtaaaccaatttgaacaaagataccatctaagttaagtagatgttcttcgccggtgctcatgtcttcgtaacgtatacctgtaacatggtcttctccgacaacttcagtagttttggcatttgttttgatatcaacatttgataaagaacgtaaacgatcttgtaacacgttgtctgcttttaattcgctagcgaattcgaataaagtaacatgattaacgataccagcaaggtcaattgctgcttcaaccccagagttaccaccaccgataactgctacgtttttattttcaaatagaggtccgtcacagtgagggcagaatgcaacacctttattaatcaattgctcttcacctggaatgtttagcttacgccaacctgcaccagtagcaataatgactgttttactttctaagacagcaccgttttctaatgtaactttaattgcttcgtcagtcttttcgatatctgtagcacgtatacctgtcattgcatcaatgtcatattgatcaatgtgcgctgctaagttagaagaaaattcagaaccagttgtttctttaacagtaatgaagttctcaataccagcagtatcattaacttggccaccgatacgatcagcaactataccagtacgtaaacctttacgtgctgtgtaaatcgctgcactaccactagcaggaccaccaccaacgattaagacatcataaggttctttattttcaaactcagatgcatctgccgtactgcctagtttcgaaagaatatcttggatcgtcatacgaccattgccaaattcttcgccatttaaaaagacagcagggactgccatgatgttttcagattcttcacggaacactgcaccatcaatcatagaatgcgtgatgttagggttgatcacactcattaagttaagtgcttgaacgacatcaggacatttttgacacgttaaactaatgaatgtttcaaaatggaatgaaccttctaagtttttaatttggtcaatgattgactgtttttctttaggtgcacgaccactaacctgtaaaattgctaaaacaagtgagttaaactcgtgacctaatggaatacctgcaaatgtgacacctgtttcttcgccaggacgattgactgagaaacttggtgtacgttttaaagacttttcagaaagtgaaagtctaggtgacatatcagaaatttctgttaataattctttgagttccttagatttatcatctgaaccaaggctggcaacgaattcaacgttgccctccattagttctaatagttgtttaagttgttgttttaaatcagcattaagcatggttgtaatgcctccttagattttacctactaaatctaaaccaggttgcaatgttttagcgccttcttcccatttagctgggcatacttcgccagggtttttacgaacatattgagctgctttgattttgtgagctaatgtactagcgtcacggccaattccgtcagcgttaatttcagatgcttgtacaacaccgtctgggtcgataatgaatgtaccacgttgagctaaaccagtagcttcatctaatacatcaaaattacgagtgattgtttgtgatgggtcaccaatcatagtgtaagtgattttgctaattgcatctgaatggtcatgccatgctttgtgtacgaagtgagtatcagttgatactgagaatacatttacgcctaatttttgtaattcttcatattggttttgtaagtcttctaattcagttggacaaacaaatgagaagtcagcaggatagaagcatactacgctccaagaaccttttaaatcttcttgtgtaacttctttaaattgatctttttttggatcgaaagcttgcgctgtaaatggtaagatttctttgttaattaatgacataaatatcttcctcctaagaatttaagtatgaattagaactatcaattgattgtgcttaattataataattctaatctcttagttagcattattacattttgatccagaatagtcaactggataactttgtaaagtgaacgattacttttaaaataaagaaagataatataaagtgctttgataatggattttgtagtcgatgatttaaaaggttgtgtctatatttaatatcttgattttaatgtaaaaaatgtaaaaaaagaagatttgtattctcaactaagtcaaccttattgataatggtgtgagaatatttgttcgagatggatgaaggtaatgcgtgagaaactggattttttaagtacgagacaatatttttgaaagttcaattattaacttataagcaaataattgctataaaaaagtttggacgtgtacaattgcaatatgaagatttttaattaactgtaaagtatcgaggagtggataacgtgtcagatcatgtatataatcttgtgaaaaagcatcattctgttagaaaatttaagaataaacctttaagtgaagacgttgttaagaaattggtagaagctggacaaagcgcttcgacgtcaagtttcctacaagcatactcaattattggtatcgacgatgagcagattaaagaaaatttacgagaagtttctggacaaccttatgttgtagaaaatggctatttattcgtctttgttattgattattatcgtcatcatttagttgatcaacatgctgaaactgatatggaaaatgcatatggttcaacggaaggtttgctagtaggtgcaatcgatgcagcattagttgccgaaaatattgcggtaactgctgaagatatggggtatggcattgtctttttaggatcattaagaaatgatgttgaacgcgttcgagaaattttagacttacctgactatgtcttcccggtatttggtatggcagtaggggaacccgcagatgacgaaaatggtgcagccaagccacgcttaccatttgaccatgtcttccatcataataagtatcatgctgataaggaaacacagtatgcacaaatggcagattacgatcagacaatcagcgagtactatgatcaacgtacaaacgggaatcgcaaagaaacatggtcgcagcaaattgagatgttcctaggaaacaaagcaagattagatatgttagaacaattgcaaaaatcaggcttaatacagcgatagcaagataccaaaataacccgccccctctagcttaaaatgataagtatagctagagggggcgggtatttcttgcaatgaattagtgtgaagttaatgcagcattatcatttgattcgaaagtatctttgtcccaatgtttagttaacttggcggtacctgtaccagctagcattgaatcgttcacgtttaatgctgttctacccatgtcaatcaatggttcaacggagatgagcacaccggctaaagcgactggcaagtttaacgttgacaacaccaatatggatgcaaatgtagccccgccaccgacgccagcaacgccgaatgaactaataatcacgacagcgattaacgttacaataaattgtaaatcaatttctacattagcgacgggtgcgaccataattgcaagcatggcaggataaatgcctgcacaaccattttgtccaatcgacaatccaaatgtcgcagcgaaattggcaatgccctccggcacgcctagacgtcttgtttgtgtttgtacattcagtggtaaagcacctgcgcttgagcgtgatgtgaatgcaaagattaatacttccaaagtctttttaacatagcgaatagggctaatgcctaacaggcttaaaataactaagtgaatgatatacatcgtaattaatgcagcgtacgatgcgattaagaattttcctaaagtccaaatggcgccaaagtcacttgtcgataatgtgttggccataattgctaatacaccgtatggcgttaaacgtaagacgaacgtcacaatcgccattactagtgaatagatagcgtcaatcgcacgcttaagcaattcaccatgatcaggttgtttgcgtgctacgcgtaaataagcaaatcctataaacgaagcaaatatcacgacagcaatcgtggaagttgcacgttgtccagtgaaatctaagaatggatttttaggcaataattccaaaatttgttgtggtaacgtatgtgctgttaaatcctttgcttgtttagcaatttcgcttccacgtgcttgttcagcgttgccaagattaattgttgatgcgtctaaaccaaacaccaaggcatacacaactcctacaatcgcagcaatcgtgacagtgccaattaaaaagataaaaatgagactaccaattttagcaaacttttctccgatttgaattttagtgaatgcagcgacaatagaaatgaaaattaaaggcatcacaatcatttgcaacagtgcaacgtaaccttgtccgacaatgttgaaccagtcacttgttgatgtaataacattcgaatgtgttccatagacaagatgtagtaacactccaaatacaatgccgatacctaaagctgtaaacacacgtttcgcaaaagatatatgtttacgagccatcatgtgcaatattacgatgaaaatcaccaatacaataatattaataagtgtaagaaaagcattcatgaacgtcactcctcaaatttttgaatataattccgactagtatgctaagaataatattaattttaaaatatttcaagagggcatttgcaattaaatgtaaacatgatgaaattcgaccgttggcataagggaatttgtaaacaaatcgttttgaattcagtagtgataggtggaaagggtaaatagtgttgtgagctagtcgattaaagttaatatttgaaaatgaagcaaggtattaaatgcaataaattaaataagttgtcattaaagcgttaatactagaaatgattttaacgggaaaaaagtgatgaatatttggaaaagatatatatctgtcatgagagataagatatgagaaaacaaatgtatccttgaatcgagatgtggctatggcggtttgataaaaattgctaacctcatatttattgaataaaaagataataaatgatcaaccttgaaaagacgcttcgaacaaacacgttgtaaaaaattctgttgaatcaaaattagcatcttgtgagggttcgtgtgtgcaggtggtagttcaaaagctaccgtaaacaaatatttttgtttgagcaaaaagacgtttgtagtaaatgtgaatatgagtgtgcccttgtgcgattcgtaagttactaacacaaccaaacatttaaattgaataggcttataagatgaatctatttaggaatacacagaagccatcccatttaaaagtaacatactacaaaaatttattcaaaattcaatattaatcataatgaataattaaaaaacctgaaacaaattagtttgatatgctctcttaaaagtagatattgaaaggagtatatcagcttgtttcaggttttatgaattgagtattaaatttgaaaataaattacagttctataggtttataaaagatcagtttttaaatcatagctatatataactgagtattaaatttgtgttcaaatcacaagtttacaagttgaataaacgtgcgaagaaaccttttttctcttcttgaggtttaggttctgacatttcagactgtgaagctgtgctgtcattttctgctttggcttccaatgaatcgttggaagtagcttgtttagaagcttctgcatgggcttctgctacttgttgttcagcatcatgttgcgcttctgcatctactgtagcttctttatttgaagtctcagctgctttgtcatttttagactgctcaacgctggctttttcaattgcttcagttgcagaaatttgatcctctttatctactttagtagcagcgccatcgcctgcattttctgctttagtatccgtcttagcgtctgttgatgtattcactccagcaactttcgaatctttactgtcagctttatcttcagtaacagctttattttcaactttatttgttgattcagccaatactttagcttgagatgcttgtgcttcttggatagcctcttgtgatgtttggatggcttttaaggattcgctatttgaatcgattttagttgtaagttgattttgaagtttttttaattcttgttgttgctgatgtacttgattcatcatttggccaagtaggtgacgttcttcgcgcattttctggatttctagacgtaaatcttctactagttgagcgacattttgattagtaggtaagtttttgtcatcgtttttgacaatgacttgcaggaagtctttttctttttctaattcatcaaacgctagatcataactatttgtttgttttactttgtcggcaatgtctttgaaaagctcgatatcttcttctttgaaatcagttgcttcacgaccacgatattcagtcttgcttagttggtaaccacgttcttctaaatgttgaacaattttacggacttgcttctcacttagttctacgcgttgtgcaaattctttagttaacatactttaaagtcctttctgcatatactttatgtatactgacgtttgtctacgggcagtgaaacgtcagtcttgcttcatacatagtttaaacgttattgttagtgatttcaagtttgtttaaaatggtttacgtaaatccattccttctaataaagcataaataatttcacgtgcgataccatttgcaaatacatacttcaaaatataatttgatttaacacttgtaccgtagatatcctttgtcagtttaatatttttctttaaaaataggtcgacttttttagtgtgaccatcattagttggatgaatgtaatcaatttcagtttgtctttcaaattgatgttcgtataaaaaatgtctacggtgttcaataatgagcccattattttgtgttaaatctgcaggttctttagggacttccatcattaaaaagttaatacttctagaatgaacaaggtttgataataagtttagttcatgttcaatttgatgtaatgtttgtgtcattaactcatcatggttgggtaggtcttttgcgaataaataaattaaaaatgctgaattggttgtggcttcataatgtgcagttgctagactgacaacaacatcgttttctaagcctacgataaagacataatcgttttcagttttgttgttttctaatgagcgtttgatgatacgtttatcttcagttaaagataaatttaacttagtatcgtaaagtttaagtgcttcgttgtaatgtggatctttgacagattgaatggttttaaattccataagaacacctccccaatttaaataatattatagcataatcgactgctgtaaaagactgttcataaacttttaaatggtataaaaaactgtactatcttaaattagacagtacagtaatctcattttgaattcagtgtgataactaagctttgggacctttagatgcttcagcaaaatgtgtaatatcaatctcttcataagctgaattattttcttgcacttcttgatgtgatgatttgtcacgaaccgctacaactaacattttatcgtctaaaataagttgtttatatttttctaattcatcaggcgctaagttgtagcgtgataaaactgcatgttcaccatcttctcctgttaacagtttagtcattctatcactaaatgttccacttgttgagataagggagatttcagagtcgtgtaagtcatttaggtgtaatttacttttactaataattgttagctctgattctaaataaccttcagatttcttttgattgattacgttgtataattcgccagtgtcatttactacagtaatatctgccatagttgtcgcccctttaaaaatttgtttatttaatcttttacccttcttattataaagtaaaacccttacattattaagttataagtcttcattcgcattaaacgtctctgtacatttataaaactattaaaagattacctaagcagttattgaaaaaatgccgaaaatttgctattatcgttaaataatttacataaactcatataatctaaagaatatggctttagaagtttctaccatgttgccttgaacgacatgactatgagtaacaacacaatactaggagtagcttcagccattaaattgtagccatgatgggtgatttatatcattttacatgatggtcacagtttatttgatgaaacttcttttacattgattgcatgaccaatacgtgatgcatgttcgttcactcataaaccctgaaactattatttagtttggggatttttttgtatctagcaccaatttaagagcaaaatgtttcacacaaatctgaggaggttttaagagtggagttactaggacaaaaagtaaaggaagacggcgttgtcattgatgagaagattttaaaagtcgatggatttttaaatcatcaaattgatgcaaagttaatgaatgaagttggtcgcactttttacgagcaatttaaagataaagggattactaaaatcttaaccattgaagcttccggtatcgcaccagcaatcatggctgcactgcattttgatgtgccatgtttatttgcgaaaaaagcaaaacctagcactttgacggatggttattatgaaacatctattcattcatttactaaaaataaaacaagtacggtcattgtttcaaaagaatttttatcagaagaagatactgtactcatcatcgatgactttttagcaaatggtgatgcgtcattagggttatacgatatcgcacagcaagcaaatgctaagacagctggtattggtattgttgttgaaaagagtttccaaaatgggcatcaacgtttagaagaagcaggtttaacagtttcttctctctgcaaggttgcttcactagaaggaaataaagtgacattggtgggagaagaataatgaaaaatttaatcctaagtgttcaacatcttttagctatgtacgcaggtgccatcttagttccaatcattgttggtacaagtttgaagtttacacctgaacaaatcgcttacttagttacagtagatatatttatgtgtggagttgccacatttttacaagccaataaagtaacaggaacaggattaccgatcgttcttggatgtacattcacggctgttgcgcccatgattttaattggtcaaacgaaaggaatagatgtactttacggttcgctatttttatcagggatattagttattatcatcgcgcctttcttttcacatcttgtaaaattcttcccaccagtagtaacgggtagtgttgttactatcattggtatcaatttaatgccagtagcaatgaattacttagctggaggtcaaggtgcaaaggactatggagatgttaagaacattttgttaggtttaatgacattaatcattattcttgttttacaaagattcacaactggattcattaagagtattgccatattaattggactcgttttaggaacgataggtgctggcttacttgggatggtcgatattaatcaagtcaatcatgccggttggttaggcatcccagtgccgtttagattctcaggatttagctttgatgtgacatcgactttagtgttctttattgtagctatcgttagtttaattgagtcgacaggtgtctatcatgcgttaagtgaaattaccggtaagaagttagaaagaaaagattttcgtaaaggttatactgcggaaggtctagcgatagtgttaggttctatattcaattcatttccgtatacagcctattcgcaaaatgtaggacttgtttctttatccggcgctaagaaaaacaatgttatatacggcatggtcgtgttattacttatatgtggttgtatacctaagcttggcgcattagcaaatatcataccgctacctgtgttaggcggtgcgatgatagctatgtttggcatggtaatggcatatggtgttagtatattaggacatatcgattttaaaaatcaaaacaatttattaattatcgctgtgtcagtaggattaggtactggtataagcgctgtaccacaagcatttaaaggtttaggtgaacaatttgcatggttgactcaaaacggaattgttttaggcgcaatctctgcaattattcttaatttcttttttaatggaataaagtataaacaaacggaagaaaatgtgaaataatataactaattaatttgaaaaatggaggctgtttttaatgtgggaaagtaaatttgcaaaagaatcattaacgtttgatgatgtgttattaattccagcacaatctgatattttaccgaaagacgttgatttaagcgtacaattatcagacaaagttaaattaaatattccagttatttctgctggtatggatactgtaactgaatctaaaatggcgattgctatggctcgtcaaggtggtttaggtgttattcataaaaatatgggcgttgaagaacaagcggacgaagttcaaaaagtaaaacgctcagaaaatggtgtcatttcaaacccatttttcttaacaccagaagaaagtgtttatgaagcggaagcattaatgggtaaataccgtatttcaggtgtaccaattgttgataataaagaagatcgtaacttagtaggtattttaacaaaccgcgacttacgttttattgaagacttctcaattaaaattgtagatgtaatgacgcaagaaaatttaattacagctccagtgaatacaacacttgaagaagcagaaaaaattctccaaaaacataagattgaaaagttaccattagttaaagacggacgtctagaaggtcttattactattaaagatattgaaaaagtgatcgaattccctaatgcagcaaaagatgaacatggtcgtctacttgtagccgcagcaatcggtatttcaaaagacactgatattcgtgctcaaaaattagtcgaagcaggtgtggatgtcttagttatcgatacagcacacggtcactctaaaggcgttatcgatcaagtgaaacatattaagaagacttacccagaaatcacgctagtagctggtaacgtagcaactgcagaagcaacaaaggatttatttgaagcgggtgcagatattgttaaagttggtattggcccagggtcaatttgtacgacacgtgttgtagcaggtgttggtgtaccacaaattacagcaatttatgattgtgcaactgaagcacgcaaacatggtaaagctatcattgctgatggtggtattaaattctcaggagatatcattaaagcattagctgctggtggacatgcggttatgttaggtagcttattagcaggtactgaagaaagtccaggcgcaacagaaattttccaaggtagacaatataaagtataccgtggtatgggctctttaggtgcgatggaaaaaggttcaaacgaccgttacttccaagaggacaaagcgcctaagaaatttgttcctgaaggtatcgaaggacgtacggcatataaaggtgcgttacaagatacaatttaccaattaatgggcggtgtgcgtgctggtatgggttatactggttcacacgatttaagagaattacgcgaagaagcacaatttacacgtatgggtcctgctggtttagcagaaagccatccacataatattcaaattacgaaagaatcaccgaactactcattctaattaagataaaggagaacgacaaatatggaaatggcaaaagaacaagagttaatccttgtcttagactttggtagccaatacaaccaattaattacacgccgaattcgtgaaatgggcgtttatagtgaattacacgatcatgaaatttcaattgaagaaattaagaaaatgaatccaaaaggtatcatcttatcaggtggtccaaattcagtttatgaagaaggttcatttacaattgatccggaaatatataatttaggaattccagtacttggtatttgttacggcatgcaattaactactaaattattaggtggtaaagttgaacgtgccaatgaacgtgaatacggtaaagcaatcattaatgcgaagtcagatgagttattcgctggcttaccagcagaacaaacagtttggatgagtcattctgataaagtcattgaaattccagaaggctttgaagttatcgctgatagcccaagcacagactatgcagcaatcgaagataagaaacgtcgcatttatggtgttcaattccatccagaagtacgtcatacagaatatggtaatgatttattaaacaattttgtccgtcgtgtttgtgattgtaaaggtcaatggacaatggaaaactttatcgaaatcgaaattgaaaagattcgtcaacgcgtaggagaccgtcgtgtattatgtgcgatgagtggcggcgtagattcatctgttgtagctgtgctattgcataaagcaattggtgatcaactaacatgtatctttgtagaccatggcttacttcgtaaaggtgaaggcgacatggttatggagcaattcggtgaaggtttcaacatgaatattattcgtgttaatgcgaaagatcgctttatgaataaattaaaaggtgtttcagatcctgaacaaaaacgtaaaatcattggtaatgaatttgtatatgtgtttgatgatgaagcatcaaaactcaaaggtgtagacttccttgcgcaaggaacactatatacagacgtcatcgaatcaggtactaagacagcacaaacaatcaaatcacaccacaatgttggtggattaccagaagacatggaattcgaattaatcgaaccaatcaatacattgtttaaagatgaagtacgtaaattaggtattgagttaggtattccagaacatttagtgtggagacaaccattcccaggacctggtcttggtattcgtgtacttggagaaattactgaagataaactagaaatcgttagagaatcagacgcgattttacgccaagtgattagagaagaaggtcttgaaagagaaatttggcaatacttcacagtgttaccaaacattcaatcagtaggtgttatgggagactatcgtacgtatgatcacacagtaggtatccgtgcagtaacatctatcgacggtatgacaagtgacttcgcacgcatcgattgggaagtcttacaaaagatttctagtcgtatcgtaaacgaagtagaccacgttaaccgcgtagtctatgacattacatcaaaaccaccaagcacaattgagtgggaataattatatttagcaaatgataggctggagataccgtgattatgcggtttccagccttttttggtgggcttggcatgggcaacatcatgtgatgaaatgatgggagttatatctttcttatattttgagacggagatgatgagaagttagacaaaaatgtagaagaagtatttaacgccaatcctagtcatacaatgattgtagatgatatccgttagaggagtgagagcaaatttatttgttactaagagacaagggttttaaataaatatcttttgtactacataaaagaaagtggtcgttatcatagaatatttggcgataaggtaaatctgattatgttagaacctatatttattgatgatttagtaaggtttgagaagacaagaatgattgaattacaattgacaattgacaccccttagattaatattaatttattagaagtcaactaacgcctcttagcaatgcgaaacacagttggcctttttttgtaataggagaatttatagttatggataaatcacttgaaattaacttaaaagaattagaaagcataatgtataaagaaaaagtaatcgacgttaaagagtatgataatttaaaagtaacttttgagacactaaacgatgctcctaaaagtgaaatacccactccctttacaatagaacaaatgttatataaattagaaactaaaaatttatattttcctgaaattaagtcaaaagaaaaatgtgtggagcttttacatagtgttggctattataatttgaagcattttatgtataatgaatttggtaaagatgagccgaaaaattttgatgaagtatatatactttataaatttgataggtatttattgaaacaattatttagtttagtaaatatgttggaaactcatataagaaatattattttagaagtatatatgttagaaattgagtataataacaagccttcgacactgttctatttagataaagatttatattttgagaaagttaatgatgagtataaatattctgccaaaaagctaaaagagttcaataggttacaaaatgttttttggagagctatagaaaaaaagaaaagtaacgataacgttaaacataatattaaaaaatacaatattataccagcttgggttttattccaaaattttagttttggagatttgtctactttttatagaactacattaccaacttatagaaataaagtaagtaagcgaattgaaaatttaatagaaaaaaatactggtataagcataaaacttccagaaaagttattgtgtgcatggttgaatagtatcaggtttttgagaaatagaatagctcacacagatataatttatggaattaattttacaaacacctgtgcaaaacatcatagtgatgaggaaatgtatgtaaatatagaaaagtataaatatcagcaaaggttagttacgtttttattagctatgaagaaaatatttatgagtatgccagaaaataatatcattgaatggaatgagactctaactaaaatagagaataaatgctcagaacataactttattaaactttctaggttaggagttattgaaaataacctttcttactttaaaataactaaataaaaaatagcgcacactaataactaagtgattgtgtttttacgctgaataatgccctgtgttgtagttagaaagattttcaaataacagtatatttataaaatgttgaattataatatggtcggtttattttataggagtaataaaaagcatttatcttttatccgccacaaataatgagtgaatgtaccttgctttcaatgttgatattttacaaccttgtagagttgatttgatatatcatctcacacgttgtaggcaatgaatacgtaaattatgcagtgacatgaactgttgagaagtatagagcattaaaaatcttgatatatcaatagatataaactggtacaaattaacgaaaagcactcttgtcattgagtgggaataattatatatagcaaatgataggctggagttaccataattatgcggtttccagccttttttggtattcttaatatgggcaacatcatgttatgaaatgatgggagtcatatctgtagaaattggcgtaccaatttctttatgttggggccccgcagtcaactactagagcctacgattttgattttatgtcctgggatcggtttcctattcttattaaatagtatttaaaaatctatactatttatattgaaatttttatttatggttatgccataactactttgtatttccggaactaaactttgcaatattgggtaatagttattagcgaaaccaataataatggaattaatcacattgatactaagttctttatcttcaggtaatgcattttctattattttgattaagtctatatattttatttcatcagaatttttatgtgctaaatacttcataaaatcagtttgcactttttcgaaaacgctatatcttaagtccatttgtacaaatattaagctgacagttttagtttcgaattgactttgacccaaaactgaagcaagttcttctattgattgatatagcaatctgatatcgccgttatcttcaagcatatgaaacactcctttatcattttagaataaccatgcaatggcttctttgactacagttgagactattccagcatcacctttacttagaccggcatttattgtgcctcgtttaaccgcatcatcgacagcgttagctggtacttctgaccattttagcaatggtttcaattcttttacaatacctgaataccctttatcaaaaatagttgcagctgtcggtggaggtctaaccggtggagccacattctgctaatattgtaggagtgataccatgaaaaatttttttaatatatgggtatgttcgttcttatttttagtaataatatcatgggtgataattagtataaaatttggtaatatcagcacgacgcaaatatttatttctaatctggttatatttattgcttatatactatatttagttaagtttattcgtttcaaaaaaaagagtggcgatcagtaaacaggtataaagaaagtcgattttgtctttctttcgaacatatataagtttatatagatgtagaactaatttttatttgtaaattattttgtaattgaaaatgagtacgaacatgttctccaataaacagagtatgtcttggaagaaatctattatacttatatgaataagtcataatgtcagacatacataataagacgaataggttgtaaatagctttttacttctaattgtttaggcggcatttgttggtcgccatttttataaaataatataaatgaccaaaccacagcacctattaatttaagagtgaggtcatttttaaaggtaaaaaagcagtaattttatatattaaaatgatatataaaacaagtagtattagtatgttgtgaattgttatagaatttgacttgttagcaatttcgtagctattgtaatagcaagtactgtagggttgtattttttaaaggtagtgaaatgatattggatttttgaagtggaatatttgtagatggttacaacgaagcatattagaactacaaaaggaacgatgaaattaaatgtccatcattccttatgcctagtcgttttttagttaatatatttaattgctaacttattattagggtctctttcaagaattttatttgcgaccaattgaatattctcatgtgaaatcatatcaaagtctggttctccaaggatttctaaaaattcgtataataaattaggattattaaattgcgaaatctctaacgattgccaataatgatagtatgctaaatcataggcattatctatgtaattgaaatgaaagtgatagatgcttgcgaccatttcatgatattcaattgtatttatttgattcgcaagatttgataaatatgatactaatttttcatcagaaatttcgttcgacataaagtatgttagaatattctccatatctttattctctaacatattttttaattcagttggtaataaatttaatagaatgttaacgcttttcatttatttaacccatccattcgatatatatattgccattttttcgtgtataagttatgactacagttctaccactcatgacaagtgttttttggtatgcggactttttgtatcggctttgctttccatacctcataacatgcgacattactttagaaacatctttccaattgtttttagtaactttattccaattatgtttactagcaagaatatgttttcttttattagctcctagattggctacagaaggtaaaactttaccaaaactctttgttttgatagcggtttgagttgctttttttccatatgttttaattgcatagtttattccgtatctagctacagcagctaatattactaatggcaatgcagaagatttagcttcaattgagttgaattttattattacgccagtttctttgtcgataaatgtagcttcatattctgcattttcaaattgttctacgaaaacgtcataattcttatttattagttttccattttcatcgacgtatctgcccttaacatccatggagttagtatttaaatcatattgaatatttttatctaaatcaatatcttcttttcgtttttccactaacgtctttttcaagttttatatttacattttttaagcagaagtatcccattatttcaacgtctgatttatctataattaaatacgcacgtaaggaattttgatcgttcattgttattgttttatgttttaggaaatgtgctattgaagggtttaaagatgtttgggatttcttggtttcttgacttatatagttatgaaagagggcgttgtcctttattaaatttctgagatcagaaatgctataaataaaatgattaagaatttttgttttcatgtaatttaagaaatggatttgttttttgtgggttatttttaattctgttctgaaatggtttgaattttgcagttgcaaaaatgatagctgcttcttttgacaaagtaatagaacctttttcttctggtaccatgacaatcactccttatgcattttgtttttaatattataaaataattttactatacaaaataggttgtgtaaatagtttcttattgttaccaaatggtttgtttgaaagcattatgcaatgctaataaacactaatatcttgtacttatttccatttgaataaattgttagcattattatcatttaagttctgtaatgtaatttttaaaaatacagtttacatggaacgttgtggcatatattctgtatatagaagtgtaaaaacacaattgggttggtagtcccaatgcagttttaaaactgtcagtaaccttcctcctcgggtcgtccgtcatttctaataaaactagaggagggatagcatggagctatctattttttacaatgggcaattttttgtagcattggtagaatataaaatggaaaataaatctaaatttatccaatacacatttgggaatgaacctgatgatatagaggtattggattttattcatcatcaattaatggaaatgattgatgatgtgcaaactattgtttatacaaaaaataattctagaaaagtaaatccgaaaaagctacaaagacaaattgctaaggagcaaaagaaaactaaatactctacccaagcacaaatagctattaagaaagaattagaattaaagaaaaagcaaaagcggaagcactataaagaaaaacgtgatgcatttcaaaaaagaaaaagagaaattaaaaaggttaaagcaaaagagaagcataaggggcattagcaatacgacaaataaattaaaacaaaatgatttataggtggttgggatgattttaattagttcgtgtttgataggcggaaatgtaagatacgatggtggcaatcaattggatgttagattgaaaaaattaatagacagcggaaaagctattcacgcatgtccagaattgcttggtggattgttaattcctagagaacctgcagaaattattggtggagatggttttgatgtgtggaataacgctgcaaaggttgttactatttctaacaaagatgtaactgacgattataaacatggagcgatagttacgctaaaaattttgaaaaaatatcaatgtgatacagttattttaaaagcaaatagcccatcatgtggatcacaagagatatatgatgggaattttacaggaaataagaaaaagggtgtaggtgtagtgactgctttactcattaatgaaggtataaacgtttatgatgaaaatacgttttttgaccaaaacatgattgaaacgatagtacatgaaaagtaagcattgaatcattttttaatctaaaatactacaaaaattttcattatgaagtgaaaataacgaacaagtaaagtgcaaataaaaaagcgacccaaatccctttaaaaacaagggttagattgtatttaattgataatgaagttgtttaatgaaaataacgtgcaagtaaagtgcaagtagaatgcaaataaaaaagcgacctaaatccctttaaaaagaaggattaggtcgtatttaattggtaatgaagttgtttaacgaaaataacgtgcaagtaaagcgcaaataaaaaatcatgcccagtatggtatatatctcatgtgtctgggtgaagtctccggatctacaggtttgatatattcttcagcaactgtgtcttttataattcttgaaataactgagatttttttatcttccaatccaaatctttttcgcagtgattgatttgtaatactttcactctcaacatatttcaagcaagcatgcatatatgttgcacgaattttttcctctctagtcatgtcattaatatctttgtaggcgtgtagagtaactttaataaattcgtcatataaagttattaatggagcggggagctgatatttttcagtttctgaaattactttgtcaattcctgttccgcgttcttcacaaatgcccattcttcttaataaggaagctagactttcatttctagattttggtggcgaatctaaaaatctttcaactttaattaatggagtgcctggattaactatttcaattctattatcaaatatttctatcacaggtccagcgccactaataagtaaatcttgatgtataagagaattagctactaattctcttatggctaattctggatacatttgaactgtttctctaaaaacttcaccaataacttcattgcttggtaataagttattaatatacttaataagtccttcaaatccacaagcatatcctttaataccgacttgttcactaatagtttcgattttgttattacctttatatttaataacgcgaggagcttttcttttaagtggtttaaaattatctaaatttttagccaataaaatcgctcctaaatttgtaatataaacattaccttcattttcttttatgatttcctcatgtttgaaatgatcaataattaaatctttttgaattggaagaggttgttttaatagtttgtaatacgattcgtagtctagtaattcaaaaatttcatcatagttttttactaaatatgcagaaagtgattcaaaaggtaactcttggaatttcttccatagttgtttttctttttcaggataatccctcagctttttcttataggatcctactcttataaattcttcaccgttaaatgaaattggttggtgaatggctttaggaattctcaatattgttatattttttccatcataatctatagtatcaaaagtaaaatctatggaaggtttaatcatcctatgaagccaattttgtaagtcttcttgtcctttttttagcattattaggatggaatttggtaccgaccaccttttttgattcatcctcaattccccatatcatataagcatagtctttgtcttctaaagttgctgaatttcctagagctgagatatattctccaattgttttagggtcatcgttatttactttaaattcagtagttgaatcttcagcgccgttacttattttttcggaaacaatattttttaaataatcttctttattcataatattaactcctaaacctatattactatttttaattattcatcattttcttgctattttatctataacatgggtatatatgttgagatgtttttaattattaagaatgcaagtcaatatatcgctatcatttgctttttaaaatagaataagttttttaataatgataacttctacattgaatacatatagtgtactataattataataatttttgagtaataatgaaatacaaaatcaggctgggacataaagttcttaggcaatgtaaaaaagctgtatttctattaattatttgatagaaatcagctttttttaaaattgtatttgataatatacagctcgtcgagctagctattttccttatattaagtgccattaatacaaaacctagctctcgtttaactttatttattcctcgaactgacattcgagtgaaacccaaaatagccttcataaatccaaaaacaggctctacatcaatttttctttgactatagatttttttcgtttctggttcagaaagcttttgattaatttgggctttaaagtattcccaattataattcttcatgattttcttattggatttcgaatttggcttcatgcattgttgcctcaaagaacatgctgaacagtcatcgcattcatatagcttgaagtcacgtttaaaaccatatctatcattacggtatgcatatcttttaaaaacctattcttttgttattaggacatataaattcatcattaagttcgtcatatttccaatttttgagtgttaaaaaatgtcacttttaaactttctagttttatctttaataaacatgccatacgtaataagtggcgttttattaaaatcatctataatagccatatagttttgctcactaccataacctgcatcagctacaatatactccaggtaaataaccgaaggtattttgaatcattgttaaaaaatggaattaaagttctagtatctgtcgggttttgaaataggtcataggataaaacaaattgagaatttgtcgctatttgtaaattgtatcctggcttaagttggccatttttcatatggtcttccttcattctcataaaaagttgcatcatgatcagtttttagaaaagctatttctatctttaagaatcgatttttgttcttcatatttactttttctttcggaataatcatcaaatttctttttgaacttcttaatctcagttctttttttacgggtctgttttctaatttgagtacaatcttcgttctcaatagaatgatttaaatcttcgatttctttatctaaatgactaccaattaaatctatttcttctattgttaaatcgctatctccatcttcttttatctctggtattattttttcttcaactaagttcacgatataatgcttttgaattttcgttcaatttcgattcgtgatttttgaatacttttcttccacacaaatgtatatctattggcactagcttctacttttgtaccatcaataaaaattgaattatcatcaataagattttgctttaaacattgactatggaactgaataaataaagattcaattaacgcatcagtattaggattcactctaaaacgattaatagttttataagaaggtgtttgatcttgagctaaccacatcattcgaatactgtcatgaagtaatttctctattctacgaccagaaaatacagattgagtatatgcatataagatgatttttaacatcatttttggatgataggatgttgcgccacgatgatgtctgaattcatcgaatttcgctatcaggtatcgtttcaacaatttcattaacatatcgcgaaatatcatttttgaggaattctaacagaagtttctattgggtagtgtaagttgggtcatgttataatttttatacataaggcacctcgttaatttagtttagtggtatttattaaattatacgaagggaccccaacacagaaaattcattttattgaattttacatttatgtgcaagttgggcaaagtgtcttatttttttaaagtatttcaaagtaaaattacatgttaatacgtagtattaatggcgagactcctgagggagcagtgccagtcgaagacaggggccccaacacagaagctgacatatagtcagcttacaacaatgtgccggttggggtggctgagacggcaccctaggaagggacccatcatcaaaaattctatttatagaattttacagtaatgtgccagatgggcatagcgaagccattcaatacgaagtattgtataaatagagaacagcagtaagatattttctaattgaaaattatcttactgctgttttttagggatttatgtcccagcctgattaatgccttatgaaagttgtgtttattaggtataatttccaaaatacatataagaaaaatgcagtaagttccaatgcgagtagttataataatattgcgtttaattgttaattagtaatcatactaatcattgatttggaagttttggtcatttattcgtgggtctaaagtccacacccaaaacactcaaatcgctcaaatccccaaaccccagactacatctccaaacccccaaacaccaatacttaccaaagcattgatatgagtgccaatactggcaatgtaccttgtttgaaaaagatactaatattgcttgaaaggccaccataaatagcaacgccaatgatatacactaaaatagctgcgcatatttcttttgggttactactgaaaaacaaaccgtatattagcaaaactccgattaaaccgttatatacgccttgattcttcaaaagtacgttaatatttttgtctttcaatttatcgacgcttatattaaatgtttcgctagtctttttggaagttgtagcaatcgtttcaaggtacataatatagaaaaactctattgctacaaatatgattaaaattgtcgagatgatattcaatgtaacgctcctttagtattaaatattttcttgtaaaaatgattgcagtgtttgtggttgatcattgactaattgttggaaatcattggattcttggtctaatagtcctcttgctcctgcgtcgtacattgatgccaataatgcaccaaagcctttaggttcatcgtacatttctgcaaatgtctctaatgaaacgggttcatatttaatttctgtgcctgatgcctcagataaaatagcagcaagttccttcatatcataactgtagcctgataataaataacgtttgccccaagtatctggatttttaataatagcaatgacgcctctagcaatatcatttctagtaatataattaatacgaccatcaccagctggataaatcagtttgtgcatattcatcaattctggtaaatatggtttaagtggatccatgtacattgccattcttacatacgtatagtcaatgccacttgttgccaatagacgtgctgcataaccaaaataaggactcatatggaatggattattatgctgatctgcgtaataacctatgaaaatgatatgagcaacgccactctgctttgccgcatatactaaattttccacttcaggaatacgtttgaatgatggatggataatacttggaataaatacgacggtatccattcctttaaatgcttctaccatgctttcttgattaaaataatctaattgtcgaacagaaacttttccacgccaatcttctggaactttctcaacatttctaacaccaatgtgaaaatgatctatgtgatttgcaatggcttgatttgtaatatgtgtgcctaaatgacctgtagcacctgttaacataatattcattcacttcatctcctaatctttatatacataacataatacttattcgatagttttcaaaacatttgattttataaaaaattgtaatctgtatttattgtcgccgtgtatagtaaatacgtatatgttattaatgttaaaaatactgtaatgacgcgttttagttgatgcgtgtcaccatgcgctttgaaaaatttgacaaagtactacgacgatatggtgtcatttttgtgtctgaaagttttacagtttttaaaataaaaatggtataaagtgtgaattgtataaaaaagagtctcgtaggataagaattgattaataacagttagcattttattaattaccttaacaatgattcaattttagttaaatgaggtttaatttgaaagggaatagtgcctcaatataatgtaggtagattgttcatattacgtaattgaaaaatcaaatttaaatagattggggctaaaaattatgaaatttaaagcgatagcaaaagcaagtttagcattgggaatgttagcaacaggtgtaattacatcgaatatacaatcagtacaagcgaaaacagaagttaaacaacaaagtgaggctgatttaaaactttattataatggaccaagttttgaatataaaaaagtaactggatatggatttattgaaggtaaagatagattcattgattttatatacaatggacaatataataaaatatctttagttggttctgataaagataaatataatgaagaagttaacccagatatagatgtgtttgtcgttagagaaggaaatggtagacaagctgataatcattcgattggtggcataacaaaaactaatagacaatcatattttgatcaaattaatacaccaattttagaaattaaaaatggtagtgaagatctttataaaggttatcatttaatatttaaagaagacatctcattaaaagaacttgattatagattaagagaacgtgcgattaaacaacatggcttgtattcaaatggtcttaaacaaggtcaaattacaattacgatgaatgatggcaaatcacatactatcgatttaagtcaaaaacttgaaaaagaacgtatgggtgagtcaatcgacggcagacaaatacaaaaaattctagtagaaattaaataatacattctaacagcaaagcgctatgttgaatagtgcttgttatggaaactatggaagttaagcgacgtattgttgcttagcttcttttttgagggtcaaagttacctgacaacacacgcagtactcattatcttttgcttaaatagcttaatcatattttatgaatagttaaaaacaggttaatgtgaatatctgaatacagctcctataatatgggtgtatggttcaaattacgtaataaaacaatctaattataatatattggagcatacaactatgaaaatgaaaaaaattgcaaaaataagtttgttattaggaatattagcaacaggtgtaaacactacaacggaaaaaccagttcatgccgaaaagaaacctattgtaataagtgaaaatagcaaaaaattaaaagcttattataatcaacctagtattgaatataaaaatgtgacaggttatatcagtttcattcaaccaagtattaaatttatgaatatcatagatggtaattctgttaataatattgctttaattggcaaagataagcaacattattatacgggtgtacatcgtaatcttaatatattttacgttaatgaggataagagatttgaaggtgcaaagtactctattgggggtatcacaagtgcaaacgataaagctgtcgacttaatagcagaagcaagagttattaaagaagatcatactggtgaatatgattatgactttttcccatttaaaatagataaagaagcaatgtcattgaaggagattgattttaaattaagaaaataccttattgataattatggtctttacggtgaaatgagtacaggaaagattaccgtcaaaaagaaatactatgggaagtatacatttgaattggataaaaagttacaagaagaccgtatgtccgatgttatcaatgttacagatattgatagaattgaaatcaaagttataaaagcataacacatatacttgatgacgaaataagttgaaattgaaatagagaggttaagtgacgatcaaacgttgcttaacttctttttaatgcttaaaaatcatttcaaaggcacatagaagcgctatattaatctcaaaagcactcattattttttgcttaaattacttaataatacttcaataattgttaaaaggagtttaatgtgattatcttagtacgccatctataatgatgttgtatgattcaaattacgtaaaaagacaatcgaatataatatagattggagcatacaattatgaatatgagaacaattgctaaaacaagtttagcactagggcttttaacaacaggcgcaattacagtaacgacgcaatcggtcaaagcagaaaaagtacaatcaactaaagttgacaaagtaccaacgcttaaagcagagcgattagcaatgataaacataacagcaggtgcaaatacagcgacaacacaagcagctaacacaagacaagaacgcacgcctaaactcgaaaaggcaccaaatactaatgaggaaaaaatttcaatttccaaaatagaaaaaatatcacaacctaaacaagaagcgcagaaatcgcttaatatatcagcaacgccagcgcctaaacaagaacaatcacaaacgacaaccgaatccacaacgccgaaaacaaaagtgacagcacctcaatcaacaaacacgccacaaccaatgcaatctactaaatcagacacaccactatctccaaccataaaaaaagcacaaacagatataactcctaaatatgaagctttaagagcgtattatacgaaaccgagttttgaatttgaaaagcagtttggatttatgctcaaaccatggacgacggttaggtttatgaatgttattccaaataggttcatctataaaatagctttagttggaaaagatgagaaaaaatataaagatggaccttacgataatatcgatgtatttatcgttttagaagacaataaatatcaattgaaaaaatattctgtcggtggcatcacgaagactaatagtaaaaaagttgatcacaaagcagaattaagcattactaaaaaagataatcatggtatgatttcacgtgatgtttcagaatacatgattactaaggaagagatttccttgaaagagcttgattttaaattgagaaaacaacttattgaaaaacataatctttacggtaacatgggttcaggaacaatcgttattaaaatgaaaaacggtgggaagtatacgtttgaattacacaaaaaactgcaagagcatcgtatggcagatgtcatagaaggtacaaacattgataaaattgaagtgaatataaaataatcatgacgttctctaaatagaagctgacatcggtaacacaagaagttaagtgacaacggtttacatgttgcttagcttcttttattatgcgcaatgatgtaaaaagacgaatattcatttgttggtaaaagtggcatttctatgtcttaaaagtgacgaaacctcaaatgtgccaagtgttgaatcacatcaaaatcatttttatttaacgaacattatggatttcttaatttacttaacgatgattcaaatatagttaaacaaggtttaatgtgaatggagcaatacgccatctataataaagctgtatgattcaatgaatgtaatcgaacaaatctaataattacgaatggagcatacaactatgaaaatgacagcaattgcgaaagcaagtttagcattaggtattttagcaacaggaacaataacatcaacgcatcaaactgtaaatgcgagtgaacatgaagcaaaatatgaaaatgtgacaaaagatatctttgacttaagagattactatagtggcgcaagtaaggaacttaaaaatgttactggttatcgttataacaaaggtggcaagcattaccttatctttgataaaaatagaaaattcacaagagtacagatatttggtaaagatattgaaagatttaaagcacgcaaaaatccgggattagatatatttgttgttaaagaagcggaaaaccgtaatggcacagtgttttcatatggtggtgtcactaagaaaaatcaagacgcttattatgattatataaacgcaccaagatttcaaatcaagagagatgaaggtgacggtattgctacgtacggtagagtacactacatttataaagaagagatttcacttaaagaactcgactttaaactgagacagtatttaattcaaaattttgatctgtataaaaagtttcctaaagatagtaagataaaagtgataatgaaagatggcggctattatacgtttgaacttaataaaaaattacaaccgcatcgcatgagtgacgttattgacggtagaaatattgaaaaaatagaagccaacattagataattcaatgaaatatggataatagtaaaatatggatagtattgaggagttaggcaacataagttgcttagcttcttttttgtgttggagagatgaaaaagagaagcggggtcatgatcaaaattttggaaatagttgatacctatagatgcgcgttgtccttttcgtgacatgaaacaatacagaatttgcaattaaattgagtaaaggtgtgaaatgtgaaaaaagctgcgttaagtttaaaaaatagattaatactgttaggatttcattaactaacttaacgttggttcaaaaatagttaaaaagaggttaattcatagcgcagtatctcacttatataatgatagtagattgttcgtattacgtaattgaattaatcatataaaaatatattaagacaaattttataaatagattgggagaatagtactatgaaattaaaaacgttagctaaagcaacattggcattaggcttattaactactggtgtgattacatcagaaggccaagcagtccacgcaaaagaaaagcaagagagagtacaacatttatatgatattaaagacttacatcgatactactcatcagaaagttttgaattcagtaatattagtggtaaggttgaaaactataacggttctaacgttgtacgctttaaccaagaaaatcaaaatcaccaattattcttattaggtaaagataaagagaaacataaacaaggccttgaaggccagaatgtctttgtggtaaaagaattaattgatccaaacggtagattatctactgttggtggtgtaacaaagaaaaataacaaatcttctgaaactaatacacctttagtagttaataaagtgtatggcggagatttagatgcatcaattgactcattttcaattaataaagaagaagtttcactgaaagaacttgatttcaaaattagaaagcaattagttgaaaaatacggtttatatcaaggtacgactaaatacggtaagatcactatcaatttgaaagacgagaaaaaggaagtaattgatttaggtgataaattgcaattcgaacgcatgggcgatgtgttgaatagtaaagacattagaaatatagcagtgactatgaatcaaatttaaagtaagcaatcaatgactttaaagtaataaatttgaagcagcttaacgataaaatgttgaataaatacgtacatcctccaaaaaggggcgtatctaaatcaacagtgtcgttaggctgtttttatgttttataacgcagggtatgagcatattaaaaattcacattacttctgaaagtggtgtccattgaatattaattagaacttcattaaccatgatttaagtttaattaaacgagcgttaatgtcagtctgtctcaatgccctttataataaatgtgtattattcaaattacgtaataaaagcaatccaatatatgaagattggagcatatgaatatgaaatttacagcgatagctaaagcgatatttgtattaggaatattaacaacaagtgtaatgataacagaaaatcaatcggttaatgcaaaaggaaagtatgaaaaaatgaaccgtttatatgatacaaacaagttacatcaatactattcaggacctagttatgagttaacaaatgttagtggccaaagtcaaggttattatgactctaacgttttgctttttaaccaacaaaatcaaaagttccaagtgtttttattgggaaaagatgaaaataaatataaagaaaaaacgcatggcctcgatgtctttgcggtaccagaattagtagatttagatggtagaatatttagcgttagtggtgtaacgaagaaaaacgtaaagtcaatatttgagtctctaagaacgccgaacttactagttaaaaaaatagacgataaaggcggtttttcgattgatgaatttttctttattcaaaaggaagaagtgtcattgaaggaacttgattttaaaataagaaaactgttgattaaaaaatacaaactgtatgaagggtcagctgataaaggtagaattgttattaatatgaaagatgaaaataagtatgaaattgatttaagtgataaattagatttcgagcgtatggcagatgttattagtagtaaacaaattaagaacatcgaagtgaatttgaaataatcaatgatatatagaataaaagcttaagaagcggtttaataaccccatgtttaatgatattgatacgtgttttaataatacaaacatatcgaacattgactacgttattaagctgcttttttgtacactttataatgaataacttaagatttaaaactaatcggaaagaacaatgattcaccaaaaaatatttatgttgctattaaaaatcagttaatacgaatgttaaaatacgtttgattttcattaataatgattcaagtttatttaaatgagcgttaatgtcagtctgttttgatgcaccttataataaagacagatagttcaaattacgtaataataacaatccaatatatcaagattggagcaaataaatatgaaatttacagcattagcaaaagcaacattagcattaggaatattaactacaggtgtgattacagcagaaagtcaaactggtcacgcgaaagtagaacttgatgagacacagcgcaaatattatatcaatatgctacatcaatactattctgaagaaagttttgaaccaacaaacattagtgttaaaagcgaagattactatggctctaacgttttaaactttaaacaacgaaataaagtttttaaagtatttttacttggtgacgataaaaataaatataaagaaaaaacacatggccttgatgtctttgcagtacctgaattaatagatataaaaggtggcatatatagcgttggcggtataacaaagaaaaatgtgagatcagtgtttggatttgtaagtaatccaagtctacaagttaaaaaagttgatgctaaaaatggcttttcgataaacgagttgttttttattcaaaaggaagaagtatcattgaaggaactggactttaaaataagaaaactcttaatcgaaaaatatagattgtataaaggaacgtctgataaaggtagaattgttatcaatatgaaagacgaaaagaagcatgaaattgatttaagtgaaaaattaagttttgaacgtatgtttgatgtaatggacagtaagaaaattaaaaacattgaagtgaatttaaattagttcgagttaatagcataatagcttaagaagcgacttaacgacaaaatgcgaattgacatccgtgtccttatataaggaactgtgttaaatacattactgttgttaagttgtttttgtaatgcaaagagcagaacagagtaacatcatcagttgtagtgaacgataatccagtaaaacacctaaatgaaataatgaaagtcatttaacctgaacattaaaatatatttgtttttcattaagaataattcaagtatatttaaatcgaggttaattatcgtatgaaacgatgcacgttataataaaaacgtatgattcaaattacgtaatgaaaacaatccaatatattaagattggagcaaataaatatgaaatttacagcattagcaaaagcaacattagcattaggaattttaacaactggaactttaacaacagaggctcattccagtcatgcaaaacaaaatcaagagtcagtaaacaaacatgacaaggaagcattataccgatactacactggaaagactatggaattgaaaaacattaatgctttgaagcatggtaaaaataacttgcgttttaagtatagaggcatgaagattcaagtattgctgcttggaaatgataaaaataaatttcaacagcgtagttataagggcttagatgtgttttttgttcaagaaaaaagagacaagcatgacatattttatactgttagtggtgtaatacagacgaataaaacatctggagttgtcagtgccccaatattaaatgttacaaaagaaaagggtgaagatgcttttgtgaaagggtacccttattatattaaaaaagaaaaaataacattaaaagagttagattttaagttgagaaagcatctaatcgaaaaatatggactttataaaacaatttcaaaagatggtagggttaaaattagcttgaaagatggcagtttttataaccttgatttaagatctaaattaaaatttaaatatatgggggaagtcatagaaagcaaacaaattaaagatattgaagttaacttaaagtaaataattacgaataataaaaaataattgaagcggcttaacgatgaaaagtaaattcgtgcgcataccttataaaaagtaagcatcaatcgatatcgtcgttaagctgttttggtttacgcttcatgaatcctatcccaatctccatgaatataaaatttccaccaccaacatcaaaattctcaacatcgcaacataaccaaatgttataataaatctattacacaaagagataaattacttattcaaaggcggaggaatcacatgtctattactgaaaaacaacgtcagcaacaagctgaattacataaaaaattatggtcgattgcgaatgatttaagagggaatatggatgcgagtgaattccgtaattacattttaggcttgattttctatcgcttcttatctgaaaaagcggaacaagaatatgcagatgccttgtcgggtgaagacatcacgtatcaagaagcatgggcagatgaagcataccgtgaagacttaaaagcagaattaattgatcaagttggttactttattgaaccgcaagatttattcagcgcgatgattcgtgaaattgaaacgcaagatttcgatatcgaacatctggcgacggcaattcgtaaagttgaaacatcaacactaggtgaagaaagtgaaaatgactttatcggactgttcagcgatatggacctaagttcaacgcgtttaggtaacaatgtcaaagaacgtactgcgttaatttccaaagtcatggttaaccttgacgatttaccattcgttcacagtgacatggaaattgatatgttaggtgatgcatacgaatttcttatcgggcgctttgcggcgacagcgggtaaaaaagcaggcgagttctatacaccacaacaagtatctaagatactggcgaagattgtcacagattgtaaagataaattacgtcatgtgtatgacccaacatgtggttccggttcattattgttacgtgtaggtaaagaaacacaagtgtatcgttatttcggacaagaacgtaacaataccacatataacttagcgcgtatgaatatgttattacatgatgtacgttatgaaaatttcgatatccgtaatgatgacacgttggaaaatccagcctttttaggacatacatttgatgcggttattgcgaacccaccatacagtgcgaaatggacagcagattcaaaatttgaaaatgatgaacgatttagtggttacggcaagcttgcgccaaaatccaaagcagactttgcctttattcaacacatggtacattacctagacgatgaaggtaccatggcagttgtactcccacatggtgtcttattccgtggtgccgcagaaggtgtcattcgtcgttatttaattgaagaaaagaactacctagaagccgtgattggcttaccagccaatattttctatgggacaagtattccaacatgtattttagtatttaaaaaatgtcgccaacaagacgacaatgtgttatttatcgatgcatccaatgattttgaaaaaggaaaaaatcaaaaccatttaagcgacgcccaagtcgaacgcattattaacacatataaacgtaaagaaacgattgataaatatagctacagtgcgacattacaagagattgccgataacgattacaacttaaatataccgagatatgttgatacattcgaagaagaagcaccgattgatttagatcaagtccaacaagatttaaaaaatatcgacaaagaaatcgcagaaattgaacaagaaatcaatgcatacctgaaagaacttggggtgttgaaagatgagtaatacacaaaagaaaaatgtgccagaattgaggttcccagggtttgaaggcgaatgggaagaaaagaagctagaaagtattataaaagttaattctggaaaagattataaacatttggataaaggcgatataccagtctatggtactggcggttatatgacaagtgtttcagaaccactaagtgaaattgatgctgttggtattgggagaaaagggactataaacaaaccatatttgcttgaggcgccgttttggacggtggatacattattttattgtacacctaaaaaagaaacagacatactatttatattaagtttatttagaaaaataaattggaaagtatacgatgaatcaacaggtgtgccaagcttaagtaaacaaaccattaataaaataaatagatttgtccctacaaataaagagcagcaaaaaataggcaagttcttcagcaaacttgaccgacaaattgaattagaagaacaaaaacttgaattacttcaacaacagaaaaaaggctatatgcagaaaatcttctcacaggaattacgattcaaagatgagaatggtaatgattatccgaattggacaaatgaaagattgggtgaagttacaactgttactatgggacaaagtccgaaaagtgtaaattatactgataactcaaatgatacggtattaatccaaggaaatgctgacatagagaatggattaattaatccccgtatttatacaagggaagtaaccaaattaattcagaaggacgaaattattttaactgttagagcacctgtaggcaaattagctatggcacaaattaatgcgtgcattggtagaggtgtatgctcaattaaaggagataaatttttatattattttctagaatggtttgccactcaaaataaatggatccgtttttcacaggggagtacatttgaatctatttcagggaatgacataagaaatatacacattaaaataccagtcgaagatgaacgtactaaaattataaaattgttaaatagtttagatgtattaaattcaaaaacagatttaaaaattcaaaaccttaaacagcgaaaaaaatcgcttcttcaaaaactattcatttaacaaaactataaaaagccccttactatttgagttagtgagggactttatcacataaggccaatagttattatcaaatttaagaagggattgttgctctggttttaatttttgagttttttatcacaccttctttaaatttttatatagattatcatatttttttgagttataatatagaaaaaacataggggtgatgatattgtttcaaaataactttcctgataacttttatagaacattagttaatgccattataagcggaaatgaagaatatttagatcaatataaatattatcaaagggaacttgaaaattctgacggattttggaatatgcgcaggtgcattattgaaagtttaattggacagaaagttttaggcttagaatttgagcataaacgctatggtggtgctggccatttgctttattcttatgagtatggtggagtgactaaaagatttataatacaaaatggtgcgacattcgattcttttaatcctaagtgtagtaaacgtggtagtgaattaaaagaacgaaaatatatgaatgaatatattgataaaaataaggggattgaatttttaaaacaaaaccaagaagttcaaggtgaatgggattttttaaataatgatgtaacctttaattcaaataaagcagatgaatatataaatgaaacagaagaattttatataatcacttatctagttgattcaagcataggaaatattcatggaattcatgtttggatgccttcaccatatgatgaaaaagcgtacttaattaaagatttatctgaattaattccaaaaaatgattcttatgacatgtttgtgtttaaagagggaacattagttaataatagtgtttattatgaagttgagtcattaggcatatcagaaattgaaaaagttgaatcatttgacatgtctgaaactgaaaataaagatgaaaaagtgaaaaagtgattatatatttgaggaggtagttatgttcaaaggagatagtttaaaatatataagaactttgcacggtatgagccgaaaagaattagctgaaaagattaaagttacagaacaaatgatatggcaatatgaagtgaaaaacgatatgcctgatatgaaaaaagtatatgatctatcacgaattctgcatgtaagaacgcgatttttctttaatgaaaaaaccgagtatttttatgataagaaaattattcaagaaacaatagcttttaggtcattaaatcagagtacttcaacaaagttattgaataaacagcacatgcacatgatgtttatagataactttaatcgctatctgactagattttttaatgttggcaatcaattgttagaattgaaaaaggggattaatgaaaaaataattgacgaaactgataaagtcgaatttattacaacattagccggctgggcaagaatgaaaataatgaatacagacggtaataataaattattattaaatcttgaaaaatatggtgttttaatattcgagaaatccattgatgctgatgctgatgcatacagtacttggactatggatgaaaaacctattatcatcttagggaaaaataaaaatattactgctagacgtaactttgacttagcacatgagctaggtcatttgttacttcataaagatgttgaatttgtacatttatctagaacagaatataaagaaaaagaaagagaagctgatttatttgcaggagcatttttattacctgaaaatgaatttaaagttgattttagtataataaaaaaagtatctaaccctgatagttatattatgttgaaagaaaaatggttagtatctgttcaagctatggccatacgtgccaaacaattaaaattattgactgaacagcaatatagatatttctggatgtctataaacaaaaaagggtataaatactgtgagccattagatgatgaaatacctattgctaggccaataaaggttaatagtattgttaatcatttattgaatagaggcttaattcaaatagatgaaatcatggacgactggttaatagacttagaccttatatgtgatttaacaggtatagacatgcaattgtttgaaagttataaggagaagtctaaaaaagaaacaaatcttcttttgtttaaagataaagaatgaaaagactttatcatttttgaatatgtctgacatgtgtataaatttgaagatggaagtctgttaaaggcaatggttttaataacaacttttagcgactgataattggggacattaagaaatgggatatgaatgaagaggaatccaaacactcgcaacaacgagtaaaaattgtttgtacattacttatacagtataataagctttatttgtagtaacaaactataataagaagtcaatagttgctgaagtcgtgaatgaagaatagttaatccaaaataatgtttataaactactagtgataaatatatcaacacattaattttttgtgaaagtcatgaaacaatttaaatcaaaagcgaacattaaatttagacactgtgaaagcgcagtgtcttttttgtgtcgaaattgtgtacagaataagtagttaaataaagattaagttgagataaagtgttattcgtaaataaaagagagtagattgataggaattgaatgatattagttaactatttattaaattacttaataatgattaatttttagttaaagtaagtttaatgtgaagcacgaccgttgctcattataatgaatgaggattgttcgtattgcgtaatagaataaatcaaatagactaaaaattgggagcatagaattatgaaattaaaaaatattgctaaagcaagtttagcactagggattttaacaacagggatgattacaactactgctcagccagtaaaagcaagtgtacagaatagttcattaactgctatctctaatgatactcaaaaattgaaggaatattatacgggggatagctttgattataaaaatttaaaaggttataaagaaaaaaatattttaacgcttttttattattatcaacaaattgatgtcacattaacaggtaaagaaaaaatagatttaaaaaaggatgacgaagtatcgaatgtagacgtatttgttgttagagaaggttcaggtagacaagcaacaaattacacaatcggtggtgtgacaaaatcaaatagtaaagactatacagataacgttcaaagtgtaagcttaaaagtaaagagcgaaacgggaagaaacttaatgagtgtttcaaattctgattatagtattaataaagaagaaatttcattaaaagaacttgattttaaattaagaaagcatttaattgaaaagtatggactatataaaaaagaacctaaagacagtaaaattaaagttactatgaaagatggtgggttctacacatttgaattaaataaaaagttacaagaacaccgcatgggcgatgtaattgatggtactaaaataaaagaaattaatgttgaattaaactaataatattcgagggagtaaatcatgagggaaaattttaagttacgtaaaatgaaagtcggtttagtatcagttgcaattactatgttatatatcatgacaaacggacaagcagaagcatctgaagaacaaaaaatggaatctaaaaatgtttctagtaatatagaatcacagtcaaaacataatagtgagaaccatataagtcaaaaacaaagtgaagtaagtgaagagcaaaataagcctgctaactttgtaaaactagaaaatgttaacccaggggatacatctgtaaaaggtacaactttgccacatcaaattattcttttaaatattgataaacagagtgtagagccagtagaagacgaaaatagtggatttgttatgtcaaatgaaaagggtgaatttgagtataaacttaaagatcgtaaagtagttcataaccaagagattgaagtttcatcatcttcattagacggattagaggaagatgatgaagaggaagaagttgaagagaaatcttcagatagtactgataaaagtgtagaatcatcaatagggaaaaaagaagaagttgaagagtcaaataatgatgctacagctacatacactacacaaagatacgaaggtgcgtataaaattcctgataagcaattagaaaagaaaggcaatcatcatcagattctagtagaacctattactgaatggtcaggcattattaaaggacatacttcagtgaaggggaaagttgcattatcaattaataataaatttattaattttgaagaaagtggtaaaggcaaaaaaactttaactgaagaagaaggtaaatcaagaattgaaggtatctggaagcacattgatgataaaggatattttgattttgatttcaaaaagaaaagatttgataatttaaacttaaagaaagatgatattgtttctttgacatttttaccagaagatgaagatgaggcgttaaaaccaattattttcaaaacaaaagtaacaagctttgataacattgcttctgcatatacagaatataatcctgaaaaggtagaaaaagtaaaaactctaaataatggtttagaggacttgaatgtcaaagatatttatggttttgtatacgagagtgagcgtggtattggtattccgcaagcaaataataacgccactaaagtaattgaaggaaaaacgaaatttgccaatgctgtcgtaaaagtttactcaagtttaggggatgggcaagaattccctgatttacaagtaaatgaaaaaggagaattcagcttcgactcttttgatgcaggttataggttatacaatggtgagaatttaaactttactgttgttgatcctgttactggtaaactattaagcaaattggtaactaaagaaattgatatttatgaatcacctgaacaaaaagcgaatcgtgagtttgacgaaagacttgaaaatacacctgcttactacaagttatatggtgataaaatagttggtttcgatactaatgatttcccgatcacttggttctatccattaggtgaaaagaaagttgaacgtacaacacctaaattagaaaaataattaaataaaacagcttaatgatgtaatgaaattagtgagttaatcactgacttcaacgtcattgagctgtttttttgtgctttgttagaaagcattattgaatttattttacgtgttcatattttgaaacatcaaagccgtcctgcttagctttgttgataatgtctttgattgaatgtagtcctttatcggcgaagtatgatcttaagttgtcttttgtagcttggtcagcatttttatctaataacacatcgatataacttaattcatgttctaagaagtttgcatcatcatgtagtacgagtccattttgagaataaactttcgcatctgcttgattactatatccaacaacgccagttgctaaaacacctaccattgccgtagctactaaaacctttttaaattccatatctatcactcctctaaaaattgtaactccatcataacactgaatattaagaaaattacgtttattaagtcgatttaataatttttaataaatagttaaactgacaaatattgtttaaatgcaattaatctttaatacgatgattatggattttcctactaaaaccttgatttcaaagagggtttaaatcaaatgaaacaataataaaaaataatgcaacataataataagtacaaatttaattaagaaattaaattgattgtatatgtatattttggtaacgtaaaagagaaatatacaaaataattaattatttatatgaaaagagaatataaatgaagtataaaatagagagacgtgaagcgatgggatatttaaaaaaggttgcattgtacgtaagtatcttaattttaatagttattgtagcaggttgtggcaaaagtgataaaacaaaagaagattcaaaagaaacacaaatcaaaaatagttttgcgaaaacgttagacatgtaccctattaagaacctagaggatttatacgacaaagaaggatatcgagatggcgaatttaaaaaaggtgacaaagggatgtggacgatatacacagatttcgctaaaagtaataaaccgggtgaattggatgatgaaggtatggttttaaatctggataggaatactagaaccgctaaaggccattattttgttactacattttaccggaatggtaaactaccagatgaaaagaattataaaattgaaatgaaaaataataagattattttattagatgaagtaaaagatgataagctcaagcagaaaatagaaaactttaaatttttcggtcaatatgcaaatcttaaagaattgagaaaatataataatggtgatgtttcaattaatgaaaatgttcctagttatgatgttgaatacaaaatgagcaataaagataaaatagttaaggaattaagaagtcgttataatatttcgactgaaaaatcacctatattaaaaatgcatattgatggggacctgaaaggcagttctgtaggttatagaaagttagaaattgacttttcaaaacgtgaaaacagcaaattatcagtcattgaatttttaagttataaaccagcgaaaaaatagtattgataaggaatattagggtgtgaaaaaatgcgatatctaaaaaagcttgcactgttcataagtgttattattttgggtatttttataataggttgtgatagttcaagcgatacttcagaaaagcaaaaagaagattcaaaagaagaacaaatcaaaaagagttttgcgaaaacgttagatatgtatccaatcaaaaatcttgaagatttatatgataaagaagggtatcgagacggcgaatttaaaaagggagataaagggacatggactttactcacaagttttgctaaaagtaacaaaccaggggtaatagatgatgaaggcatggttttatatctaaatagaaataccaaaaaggcaacaggttattattttgtaaataaaatttatgatgatattagcaaaaatcagaatgagaaaaaataccgtgttgaacttaaaaataataagattattcttttggataatgtagaagacgaaaaacttaaacaaaaaattgaaaattttaaattttttagtcagtatgccgattttaaagatttaaaaaattatcaagatggaagtataacaactaatgaaaatgtaccgagctatgaagcagaatacaaattgaataataatgatgaaaatgtaaaaaaacttagagatatttatccaattacaacgaaaaaggctccaatattaaagttacatatagatggtgatataaaaggaagttcagttggatacaaaaaaatagaatataaattttcaaaagttaaagatcgagagacaacattaagagattatttaaattttgggccatctgatgaagatagctaaagtttattagatgtagaaataattctaaaacagagagacgtgaaatgatgggaaatttaaaaagttttgcattgtacataagtatcttgattttaatagttatggtagcaggttgtggcaaaagtgatgaaacaaaagaagattcgaaagaaacacaaatcaaaaagagctttgcgaaaacattagacatgtacccaattaagaatctcgaggacctatatgataaagaaggatatcgagatggcgaatttaaaaagggcgataaagggacatgggttatcagttcagcaatggttaaacagccaaaaggtaaaattatgagatcaagaggtatgtatctatttttaaatagaaatacaagaacggcaaaaggatattttattgtagatgtaacaagtaacgatacattaaaaaagacagaagataaagaaaagtgttatccagtaaagatggtaaataataaaataataccgattggtccaattaatgacgaaggcataaaaaaagaaattgaaaactttaagtttttctcacaatatggtgattttaaaggattaaagaattatcaaaatggtgattattcatataactcagaagcacctacttattctgctaaatttcaattaagaaatgatgattataatgtaaaacaattgcgtaaaatgtatgatattcaaaccaaaaaagctcctaaattgttgttgaaaggtactggagatttaaaaggttcatcaatcggacataaggacattgagtttaccttcgttgagaatcaagaagagaatgtattttttactgatagtttggagtttaccccaagtgaggactattaactatgatgaaaaaaggggatacggacaatgaataattttaggcaatgcgcgttgtgtataggtacatcggtcttaattctattagtgtcaggttgcagtggcgtatttgacactcctgaagattcaaaagaaatacaaatcaaaaagagctttgcgaaaacgttagatatgtacccaattaagaatcttgaagatttatatgacaaagaaggatatcgagatggagaatttaaaaagggagacaaagggacgtgggttgttagatctgaaatgataattcaaccaaaaggtaaaagtttaacttcaagaggcatgatattatacatgaatagaaatactaggaccacaaccggttatttttcaatagaagaaatagattcaagaaaaagccttgatgaaagagaaacagaaaaaaagtatcctgtgaaaatgataaacaataaaattattccaactgaggagataaaagatgaaaagttgaaaaaggaaattgaaaactttaagttttttgtgcaatatggcagttttaaaggaatagagaattatgaaaatggtgacatttcctacaattctgaagctcctatttattcagcgaaatataaactgaaaaatgatgattataatgttaaagaattacgaaaaagatataatattccaacagaaaaggcgcctaaattgttgttgaaaggttcgggggatttgaaagggtcttcagttggatataaggaaattgaatttatattcctagaaaataaaaaataaaatatatatttttcagatggattaaacttaattccaagtgactaaaaataacacaaaggttgatagtgctcaacaaatattaacatgatagagagaagtgaaaaaatgaggaattcaaaaagagtagtattgtacataagcattatggtgttgagcatttttataattggttgtaatagttcaagcgagaatgcaaaaaaatcaaaagaagactcaaaagaagaccaaattaaagagagctttgcgaaaacattagatatgtacccaatcaaaaatcttgaagatttatatgacaaagaaggataccgtgatggcgaatttaaaaaaggagataaaggtatgtggaagatatatacagattttgccaaaagtaataaagcgggtgaattggatagtgaaggtatggtgttacatttgaatagaaatacgcggacggctaaaggatattattttgtaagaaaaacttataacgaagaggataagatgccgcaaaggaaagattatcgtattgaacttaaaaataataaaatagtccttttagataaagtagaagatgaaaaactcaaacataaaatagaaaattttaaattttttgggcaatatgcagattttaaagacttgaaaaattataaaaacgggaaaatatcgagcaatgaaaatgtgccattttatgaagcagagtacaaaatgggaaatagtgatagtaatgtaaaaaaacttagagatgtttatcctatcacaaccagtgaatcgccaacattaaaatttcatatagatggggatataaaaggtagctcgataggatataaaaaagtggaatatatcttttcaaagcaaaaagataaccaaatttctgtcagtgattttttaaattttaacccatcaaaagataatcagtagagattcaataaaaaaatcagacaagaaagatgtggaataatgagaaatttaaagagagacgtattgtacataagcattatggctttgagtatttttataataggctgtgataaatctagtgttactgctgaaaagccaaaagaagattcaaaagaaacacaaatcaaaaagagctttgcgaaaacgttagatatgtatccaattaagaatctcgaggacttatatgataaagaaggataccgtgatggcgaatttaaaaaggacgacaaaggaatgtggactatatatacagattttgctaaaagcaataaatcagacgaattggatgatgagggtatggttttaaatctggatagaaatactcgaacggctaagggatattattttgttaagaaattttatgaaaaggataaattttcagatagaaaaaattataaagttgaaatgaaaaacaataaaattattttattagacaaggtaaacgatccaaaccttaaagaaagaatagaaaattttaagttttttggacaatatgcaaattttaaggatttggaaaattacaacaatggcgacgtgtcaataaattggaatgttccaagttatgacgtggaatataaaatgagcaataaagatgaaaatgttaagcaattaagaagtcgttataacattcctactgataaagctccaatgttaaaaatgcatattgacggggacttaaaaggtagttctgttggatataaaaggttagaaatagacttttcaaaagaagatagggatatttcagtcattgattatttaagttataagccagcgaaaaaatagtattgataattatatattagggtgtgaaatgatgagatatttaaaaagagttgtactgtacataattgttatgtttttgagtgtttttataataggttgtgataaatcaagcgatacttcagaaaagccaaaagaagattcaaaagaagcacaaattaaaaagagttttgcaaaaacgttagatatgtaccctactgaaaatctagaagacttttatgacaaagagggatatcgagatggcgaatttaaaaaagatgataaaggtacttggctaattagatctgaaatagttaaacagccaaagggcaaagtgatgaaaacaagaggtatgcaattatatattaatagaaataccaaaatagccaaaggtttctttgttttgaaagaaataagtgaagaaaacaatcgtgtaaataaagataaggaggaaaaatacgaagtgaaaatggtaggaaataaaattattcctactgaacaaattaatgacgagaaaataaaaaaagaaattgaaaacttcaagttttttgtgcaatatggaaactttaaaaatttcgaaaaatacaaaaacggtgagttttcatataatcctgaagcaccaatctattcggctaaatatcaattacacaacgatgattacaatgtaagacaactacgtaaaagatatgacatttcaacaaaagaaacaccgaagttaattttgaaaggtggaggagatttaaaagattcctcagttggtcaaaacgatattgaatttacttttgttgaaagaaaaggtgagaatatttattttaacgatagtgttgaattcataccaagtaagtaaagttaaattacaatgtgtagtttgatgaaataatcaaatatcaaaaaatgtgcaaagagatgtgacaagatgaagtgttttcagaaattatacatatttatattaattttaatcgtattaatggcaggatgcgaaagtaataatgatgacaaagatgcaaaagaagaacaaattaaaaagagctttgcgaaaacattagatgtataccctacgaaaaatctagaagatttttatgacaaagaaggatatcgagatggcgaatttaaaaagggtgacaaagggaagtgggttattagatctgaaatgacaacagaactgaaaaatgaaaatatggtatctaaaggtatggtcatacgtttaaatagaaatagtagaacatgcactggtgaatattttgtcaggatagttaaagaagaaagtgagggcaaggtatatagtgatgaacgaaaatatcctgtgaaaatggaaaataataaaatcattccattaaaaccaatcgatgatgaaaaagttgaaaaagaaattgaaaaatttaaattctttgtgcaatacgggaatttcaaagaattgaaaaactataaagatggtgaggtgtcatataacccagaagtaccaatttactctgcacaatatcaattgaaaaacagtgattataatgtagaacaattacgtaagcgatataatatcccgacgcaaaaagcgcctaaattattattgaaaggctcaggtaatttaaaaggtttatcagtcggatataaaaatgttgaatttacctttgttgaaaacaaggaagaaaatatttacttcacagatagtgtctactttaatccaagcgaggataaataaatataattactaatataaaaaataacgttagaacatttaataataaagttaaatgaattacatgtattaaattgaataagttagttttgtttgataacataaaagtgtaataatcactattttattaagttgtatgaaatattcaaatgtgtataaaaataaagcagagagatgtgaaatgatggagtgtataaaaaaaattgctttgtacatgagtgtattacttttaatcatttttattgggggatgtggaaatatgaaagatgaacagaaaaaagaagcacaaacaaataaaacagattcaaaagaagagcaaatcaaaaagagttttgcgaaaacgttagatatgtatccaattaagaatctcgaggatttatacgacaaagaaggatatcgagatggcgaatttgaaaaaggtgacaaagggatgtgggttctctattcatctattgtatcggaattcaaaggtgagagattaaaatcacgagggatggtattaaagttagatagaaataagagaactgctaaaggaagttatattattagagaattgaaagaagataaaaatcatgatgttcaaaaaaacgaaaaaaagtatccagttaaattggtgaataataaaataattccaactgaagatgtaaaaaacgaagatttaaaaagagaaattgaaaacttcaaattattttctcaatatggtgaatttaagagtttaaatacggataggataacaaatatttcttataatcctaatgcgcctaactattcagctgaatataaaattaatgatgatgataataatataaaacaattaaaaaatcgattcaatattaagtctaataaaaatcctaagttattgttcaaaggagcaggtaatataaaagggtcttctgttggatataaggagatacagataattttcaataggaacaaagaagaaagtgtttcttgtattgatagtatagagtttaaaccgagtgaaggagaccataatgagtaagagtgactataaattagatgttggcaaattaaaaaaagatactgaaccgacaagcgcaatatcatttatggcgtatgaaattgaaaatgctaataatcataatttgagtaagatggcaataaaggaacagttagacagaagcacagaaaggggcatgttcccttctaatcttgaatatgttgatagttacactgattctcttactggagtaacaacttctgcttttttaaataaagatacaggcaaagtaactctcgggatgactgggactaatttacaagacgaagcctttaaaaagttaaaagaaggtgaattttcaagacaaaattttaccaatgctttggaaacagttaaagatggatatgcagatcttaaaatattatattctcctgcatctgatcaaaactatagatatgcgaatacacaagaatttataaataaaataaaaagtaagtatgacattgattttattactggtcattcactaggtggaagagatgcagtagttctaggaatgagtaatggtattccgaacattgtggtttataatccagctcctatttctataactagtttgaatcctaattccccagatggaaaacgattgttagagttatataaaaattataaaggtaatattactaggtttgttgcagaaaatgatgaattgacagaaaatctgaagaaatataagcattatgtttttttcggtaatgataaagtctttaaaaatggtaaaggtcatgaaatgaaagggtttttaaccaaagaagaacaaaaagctataaaaaaagaacttaaaaaactacaaggttatgcagaagaaaataataagtcatttgtaaagcattcaaataatgctatctctaaattagctagtatagaattacttagagccaatatgatgactacaaatggaggaggattatcttcttcgcagcagaaagttttagaaagtttaactgctttaacaattgcgcagtcattcagtcaactgatagacgatgaaattaatcaaatcaaaaaaatgtataatgaaaagaaaaagaaatttgaaaaaaattgggaagacgctcaaaaagctggaaaagctgtaggtgaagatttgagtgtaaatgaagttctcaatgctttagatgaaggtcaagtgaatgaaagtagtatggtaagagaacctgaacaaatgatatctgcaaaagaaagacaactttcaacgatagggtcttctgtatcaaattatattatgagagttagactcagtattaatgaaatcgttgataaagatcaagtgcttgcatcacaaataggtggattactatgatgtttaatcaaattaataataaaaatgaattagaagaatcatatgaatctgagaaaaaacgtatagagaatgaactgcaaaatttaaatgaacttaggcatagaactcgaaaagaaaatgaacgtagttatgatgtttttcaatatttgaagcacgaaatgaattatagtgaagatgcccaaaggaaaatgacgagaaatatagaagcgtatgagcaagaaatcaatgagataattagaaagcaagaatggaaattagaagaatataaagaagacttaaaaaagtcttatgaaaagcagttagataaactaagtgactgataatttggaggagattaaatgactctaatagaaccagatatgaccttaagaatgccagatataagtactacagtagaaacacttaatctcatatctaaaatggaagcacaaaaagaaaatattcgcacagttattgcacctgaacataagcataaatacaaagatattgaaaacggattaaaaggtgaagaaaaagtattaattgaacaaatggcgcagcattgcgaggcttttaaagctaattttaaaggcgcagctcaaggagattgggttaaaagtgctatgtctgagattgacagcattaaggatgatttgaaaaaaattaatagctaaactacatatcatactactaaataaagcgaccaatgttcagtatattcacaactgacactaggccgcttccttttatttattttattcccatgtaaagtgattcgaaccgaatggaaatatcacactcacaattgtaaaaacacaacttaaattactgtcccgcattaaacataaccacattcgtaacagcaacaataaaaatcctgaagtaccaaaagctatgacctctttatcaaaatcaacgcaagttaacctctcccgaactacccgccataaatcatcttcaccttacaaaccataaagcgctgcagttaagtattgaatggcatagccaattgaaatgaaaatagcaatcgttataatagcactgccaatggtatataacgtatgtttcgtagataatccttcagtctttgaaccaaaaacactgagtagaataaatgcaataccaatgatatataaaactaaaatgacaaatagcatgtttatacacctcgattctctttcgtgagatatatctttgtctccattataaagtaaagtgctcaataatttaattaagtatactatttttttattatcgaagattgcgaaagaggaaacgctcctatataatgtaaaacgtaattattcctatttataaataagttgaagtgagggtatatatatggctaaaattccagttacggtattaagtggttatttaggctcggggaagacaacgttgttaaatcatattttacaaaatcgtgaaggtcgacgtatcgcagtaattgtaaatgatatgagtgaagttaatatcgataaagatcttgtcgcagatggtgggggactatcgcgtacagatgaaaaattagtcgaactctctaatggttgtatctgttgtacacttagagatgatttattaaaagaagttgagcgtttagtgaaaaaaggtggcattgatcaaattgttattgagtcaacagggatttcagagccagtacctgttgcacaaactttctcatatattgatgatgaacttggcattgatcttacagcgatttgccgtttagatacaatggttacagttgtggatgctaaccgcttcgtccatgacatcaactcagaagatttattgatggatcgtgatcaaagcgttgatgaaacagatgaacgttcgattgctgatttattaattgaccaagttgaattttgtgatgtattgattattaataaaatagatttaattagtgaagaagaacttgcgaagttagaaaaagtgttaagtgcattgcaaccgactgctaaaatcattaagacaacaaattctgaagtagatttaaaagaagttttaaatacgcagcgttttgattttgaaaaagcgagcgagtcagcaggatggatcaaagaacttgagtctggtgggcatgcatcgcatacacctgaaacagaagaatatggtatatcatcgtttgtatataaacgtcgtctacctttccatgctaaaaggttcaatgattggttagaaagcatgccaaataatgtcgttcgatcaaaaggtatcatatggttagcacaatacaatcatgtagcatgtttattatctcaagcagggtcatcttgcaatattcatccagttacatattgggtggctactatgtctgaagaacaacaaacacaaatattagcagaacgtcaagatgtcgcagctgaatgggatccagaatatggcgatcgtcatacacaatttgtcattattggtaccgacttagatgaagaaaaattaacaaaagaactcgatgcatgcttagtcaatgcgcaagaaattgatgcagattggcaacaatttgaagatccatatcaatggcaaattagacctgcacgctaagttgaatgaagtataatcatttttaaattgtggcttaattgtttgcaatttatgacaattaataaaaagttaagatgttcttaggatctttttgttttcaatctatctaaagtgtgatagttttgataaagcagaaatttgcattttatccatagggctaggacatgtatgtgtcttagtcctttttatatttgcgttgatgaaaaatgataaaaccatcgtaccaactgttaattgaaggtacaatcattgtttaacagtcataaaaatgagggaagtaaatgcagctatcaatgtactattaacgcttacggtcacacgagtgtttcagtctaaacgtgcaacgcaattccgcacgcggccaatatatcttgcgctagatcaagaagatcattaagatttagcacgccaaatcatgaatttctcagacctcgagtatcaaacataaaacacgccacaaaaatataacgcgtcagactacaaagatcacgaatattccgtacgtcccactaagaacatcctatacaaaaaacactaagaccatttatttgcaacaaattacccagactcacctcatatcaataaatcaacacaaagcaaagccactatccctattggtatagtggcctgagaattttaagtattcaattcgcttaaattattttgcgaaaatgtcgataattgctttgatgattttaatgatagtacctacaatagccatcgttttgtcctcctgtatgttgatttaacatagtgatgagttgttgatcgttaatgtttgagatttagttgttacctaaaaatttaccaagtaaatctttaaagaatttgaataattttgctacgaattccatgtgaatggcccccttcaaataagatgttcatatctatgatatttttataacttacttaccagtgaatttctcaattaatcctttaatgaatttaatgattcctgcaatgatacccatgtgaaagacctcctttgtttgttatgaaaacttatttaccagtgaattgttcgattaagcttttgataactttaatgatgccagcgatgatacccattaagattacctcctttgcttatgagttaacttcattgtacatagttatcttgtgcgtaattgatttttttcctaacttgaattgttatgatcataactgcgaattttttattttaaaaggacgggaaatactgcctaactgtacaggtgcatttacaaaatctttacaatcattggtttaatagaggttaagctcatgaatttgacatgaagcagaaatttaattatattttatgttataagtttaaaacgaataacacgttaggtctcgtctaggcaaggcatatttatgaagatgaattgaacagacagaagtaacattttatatacatatgtgcatgggagcacgcttaaagagaacagtgtaacaaggtatatcaacataccatggtgcagtgtctagttaaactgaaacctgcaatagtaaattttctgccattatgtacagaatctactattgtaggtttttatttttatacataagcattatgcgagagattagaaataaggaggttatgcagtgttaagttttcaattgctattttcactgtttgttattgcgattatcattgcattgataagtggcttgttgtttttagcaccagttatgccaatgagatatattaaattacatttatacatactagtcatgccagtattatttgcagtaattggctttttcggtattcatggtcaacatgtcttaggcccatttaaaatagatcgtttatcttggttattagctggctttgtaatggcgcttggctttattattcaaaagttttcaatgcgatatttactaggtgatcatcattatagacattactttccattgttcactgcgattacgtcgtttgcatctttagcatggatgtctgaagacttaagactgatggcactctgctggggtatgacattattatgtttaacattgctgatgaacgttaatcgtttttggaaagtgccacgtgagtctgcgaaattatcaagcatgacatttttatgtggttggcttgcattcgttggtgcaattgtaactatttatattgcgactggagaatggcttgtgcctcaacatatgtctcatccgtcagggtcattgattactgatgtattacttgtattagcagtcatgataccggcagcacaatttccttttcatcgatggttgattgaatctgtaacagcaccaacgccagtatcggcaattatgcatgcaggaattgtgaatgcaggtggtgttattctaactcgttttgcgccgatatttgataatggatttgcgttatcattattacttatcctttctagtatttctgtactgttaggatcaggcataagtttggttcaagttgactataaacgccaattagtgggctctacgatgagtcaaatgggctttatgttagttcaatgcgcacttggtgtatattcagcagcgattattcatttaatattgcatggtatttttaaagcaacattatttttacaatcaggttctatcgtgaagcgattcaatattccaaaacaagcatctgctaaagacgcttatggctggattgtcatgggacgtgtattagctattatcgtggcatttctattttggatgagtagtgatagaagtgcatatgaagtgttaagtgcactcattctagcatggtcattacttgtatcttggaatcaaatggtagcctttagtaaagggcgtatggcacgtctggttggcatgattttgatttcaattgtgacatttatctacatcatcacacataattatttttacgatgtattacaaaatataacaacacatgcgacaacaccgcctacaattagtgtcatcattagtgttgtcatattaatatttggtagtttattaagtatctgggtggcgcgtcatcgatactctaaggcttttgcggtattgtacgtgtggttaattaatctaggtgaagcacgctcgaaagcgatagaaagtcatccgaattatttgaagaagtatttataggaggtgaaaggtatgacaacacagttaaatatcaattcagtcattgaaaatgcgaaacgtgttattacaccattatcaccgatttcgatttttgcagcacgtaacccctgggaaggattagaagcggatacgtttgaagatgtcgcaaaatggttacgtgacgttcgagatgtggatattttcccaaataaagcattaatagaaagtgctgtggcacgtggtgaattagacgaaagtgtctttaatcaacttgttactgatatgttacttgaacatcactacaatatcccgcaacactacatcaatctttatattgataacattaaaacattaaaagacgtacctgcatcatatatgaatcattcaaatgttgatgttgttgctgatctactattagaaaaatcaaaacgtgatatggctgaatcatatcatcactatgatgtacgtccgatgagtgatgcaataatagatgaacaaggtgagccacttagcgaacaagtgaatcgtcaaatgattaaatggacgaaactttatatcgaccaatttttatcgagttggacaatgccgaagcgtgaacaaagtttttaccatgcatggttgcatttagcgcaacatgaccatagttttactaaagcacagcgccaagtgattaaagacttacccaatgatcctaaaatgacgatagagtcagtattaaatcatttttcaatagcgcaggaagactaccaggcttatgttgaaggacatcttttggcgttaccgggttgggcaggtatgttatactaccgctcacaacagcatcactttgaacaacatttgttaacggattatttggccattcggttagttgtcgaacaattgctagttggtgatgagtttaagtcagtcactaaagattgtgaaagtagatcggaaaattggtttaagcaaactgttgcatcatggtgttactacagtgatatgcctagcgatgtattactacaacatgacgtcaatgaaattcaaacgtttattcattttgcagcaactatgaataaaaatgtatttaaaaatttatggttgattgcctgggaaatgacatacgaatctcagttaaaacaaaaaattaaagcaggtcatgaaagtttggcgggcgcattagatgtaaaccaagtaaatgttactgaaaatgacaacgctaatcagtcacattcagtatcgttaaatgatacacaagcagttgatgaaaataatagcgagctaaatcaggtgggcacatcaacgaaagcgcaaattgcattttgtatagatgttcgttcagaaccatttcgtagacatatcgaagcagcaggtccatttgaaacgattggtattgcaggtttctttggattacctattcaaaaagatgccgtagacgaacaattcaaacatgattcattacctgtcatggtaccgccggcatatcgcattaaagagtttgcggaccgttacgatatgaatgtttatcgacaacagcaacagacaatgtcatcgatgttttacacatttaaattgatgaaaaataatgtcatgcctagtctgttattgcctgaattaagtgggccatttttaagcttgagtaccattgtcaatacgattatgcctagaaaaagtcgcgcgtctttacagaaaataaaacaaaaatggttgaagaaacctgaaacaaagttaacgattgatcgtgagtttgacagaacatcagacttacctgttggatttactgagcaagagcaaattgatttcgcgttacaagcgttgaaattgatggatttaaccgaagcatttgcgccgttcgttgtgttagcaggtcatgctagtcattctcacaataatccacatcatgcatcactcgaatgtggggcttgtggtggtgcatcaagcggttttaatgctaagttattagcgatgatttgtaatcgtccaaatgtcagagaaggattaaaacaagcaggtgtgtatattccagagacaactgtttttgcggcagcagaacatcatacgtctactgatacgttggcatgggtatatgtgccagacacattatcagctttagctctagatgcatatgaatcattgaatgacgctatgccgatgatttctgaacacgcgaatcgcgaacgtttggacaaactgccaacgattggtcgtgtgaatcatccagtggaagaagcgcagcggtttgcgagtgattggagtgaagtacgtccagaatggggcttggctaaaaatgcatcatttataattggacgacgccaattaacaaaaggcattgatttagaagggcggacatttttacacaattatgattggcgtaaagataaagatggcacattgttaaataccatcatttctggtccggcacttgtggcacaatggattaatttacaatattatgcgtcgacagttgcgccgcatttttacggaagtgggaataaagcgacacaaaccgtcacgtcaggtgttggtgtcatgcaaggtaatgcgagtgatctgatgtatggcttatcatggcaatctgttatggctgctgatcgaacgatgtatcattcgccaattcgtttgcttgtcgttgttcaggcacccgactatgttgtagctagactactcgcgaataatgagcatttcgctaggaaggtgtctaatcattggctgcgtttaatgagtgttaatgaggaagggcgttttaaaagttgggtttaacgatgaaatgttgcgatgctaagtaactaatatatcatcatatctacaatgttctagcttcttaaaatatactaaaaatgataaacttaatgtaatagttgatgtcgtgataacgatacaaagatgaagtaatcaattttaatattattggagttagtgatatgaaaagaacgaaaggtgaaatcgaagctgaaatcagtaaagccattacgcaatgggaaaaagatttccttggtagaggttccttgtcggttaaatcagacattttaagagatatggtgattattagtttgcaaggtatcttaacgccagcagaatatcgtgtgtgtagtacgaatgaaggattattaaatattaaacgaacacgttctgaattagttgaatccggtgagcaagatttgaatgatatcatttttaaaattacaggtatcaaagtgatgagcttccatagtgatttaagtacagttacaggtgaacgtattatcgtattcaaacttgaggataatttggaaaagcatatttaagaaggttaggtatgcttctgctggcttattaaagctatagaagtatgcttggttaaacagcgcaacgccatatatttgggtgtgctgtttttctattatatgatgtgtttatcacctggaagaatgtgtggctctgaatagagcccgtgaaaggcgtatgtcataaaatttgcgaatggtgacaagtcaacgcaagcatatttgttgcgagacatgcccactatccttttacataaagagtatatgtgtgacgtaggcatataatcgataaagtatacctaaaaaattaggtataatgaccattgttgcaataagtttttcggccttgaaaccgataacgcatagtataataggaataaaatataatacaaatatccagtaaatcaaatttgaaaacgatggatgtataggggtaaagaatctaactaatgtaatgattaacgctatatagacaaaaattactctattgatacgccctaccccctctgtataataaatatagatcgtactaaattgaaaatagcaaaatattgttatttcaattatacaatgttttatttgcaatatacataacaatatgaactttataattttgatattgtcggtaaagtgaaatttgtggcacattgatattatggataacatttgtaaaatgaaaatgatgatacgaggagattgtaagatgatagataaaaaattaacatcaccgaaaatgacagtgcctttatttttaatcgcgctgattgtatttataggtatgttttacagtgtagtgacaagccaagaatggcttaaaaatttagatatgggatcattaacatggtttacagattatttcggtgagccacaacgtcagtatgttaacaatttgtttaattactatatgacgtttagtgcggaaattggagatgtcaaaggtgtcgtgttgatttccattatcgtcacaatcatactgtttattaaacagaggcatttagcggtttggtttgtgacatatttggtttcaggtgtcatcatgaacaaattaattaaagatactgttttacgtccaagaccatataatcatttagccgttgatacaggcttttcatttccgagtggacattctaacgccagcacattattatatttcgccttaatgatcattattatttcagttgctgctaagacaataacaaaagtgttgagtgcgctggttatgggaatattatggcttagcatattattttgtcgcctttattttcatgcgcattacttttcagatgttattggcggcacgtcactagcaatcatttgggtagcgttattcttaatggtatacccatactttattaatcatcgacgacaacgcgtttagcaaacatctttagacatagtggaggtatatagaaaaatgagaattaaaacaccgagtccatcttatttaaaaggcacaaatggacatgcgatattattattacattcatttacaggtacaaatcgggatgtgaagcatcttgcagctgagttaaatgaccaaggatttagttgttatgcaccgaattatccaggtcatggtttattgttgaaagatttcatgacatataatgtagatgattggtgggaagaagttgagaaagcttaccaatttttagtcaatgaaggttatgaatctatcagtgcaacgggtgtgtctttaggtggattaatgacattaaaattggcgcagcactacccgttgaaacgtatcgctgtcatgtcagcaccaaaggaaaagagtgataatggcttaatagaacatttagtttattatagtcaacgcatgtcgaatattttaaatttagatcagcaagcatcgagtgcgcaattagcagcaattgatgattatgaaggtgaaattacgaagtttcaacattttattgatgatatcatgacaaatttaaatgttattaaaatgccagctaatatattatttggtggtaaagatgcgccatcctatgaaacaagtgcacactttatttatgaacatttaggatcagtagacaaagaattaaatggtctgaaggattcacatcatttaatgacgcatggagaaggcagagatattttagaagaaaatgttattcgctttttcaatgctttaacataattgaagattttaaaaattaacacttgagtgacgatgttattatatttgtcatttgagtgttttttttgtggcgtgatagtatagggaacttagacaaagttaatttgtattgtgatgtcgtggaaatattatggagtaataccagaagtggatttgtattgcaatgtcgtgggaattttgtgggcattgtacctgaagttgatttgtggcgagatgttggcgcacgtatacagcgttgaaccagaaattttaatgtagcgtaatgacaacacattacaagggatttactatattattataaacccaggtgctaccgtattaatgaaacaattttgatgcaggtgtattgcatgttatttacatacatgttagagtgttacttaaacacgtagacgctttaacgctttaaaggagatgtgaatgatgaaaagacaacaatcacaatggaagtcatcaactggatttattttagctagtgcgggttctgcaatcggtcttggtgccatgtggaaattcccatatatggcagggatttatggcggcggtgcctttctagctatgttcttaatattcaccatttttgttgggttaccattactcattatggaattcactgttgggaaaatgggacggacgtatacaacgcaaatatatagtaaattaactggtaagaaatggctcaatatcattggctggaacggtaatttggcagtgtttattttatttggcttctatagtgttatcggtggttggattgttatttacatcggacaagtattatggcaattagttatatttcaacgcatcaatcatctccaagaaatgaattttgaagcggtaatatcaaatccttggttaaccgttctagggcaaggtatattcatattcgctacgatgattattgtcatgttaggtgttgaaaaaggattagaaaaggcatcgaaagttatgatgccgttgctgtttgtctttttaatcatcattgtgattaagtctttaacattagatggcgccttagaaggtgtgaaatttattttacaaccaagagtgtcagagattactgctgacggtatcttgtttgcgctaggccaatcattctttacgttatcattaggaactacaggtatgattacttatgcgagttatgcctctaaagacatgacgattaagtcatcagctatttctatcgttgttatgaatatctttgtatctgtattggcaggcttagctatatttccggcgttacatagttttggctatgaaccacaagaagggcctggattattatttaaagtactgccaatggtctttagtcaaatgcatctaggtacattattctatttgggattcttagtgctattcttatttgcggctttaacgtcatctatttctttattagaattaaatgtttctaacttcacgaagaatgacaatacaaaacgtaaaaaagtcgcagtgatcggtagtattttagtatttatcattagtattccagcaaccttatcttttggtatcttaaaagatgtaagattcggtgcgggaacgatttttgataatatggatttcatcgtttcgaatgtattgatgccattaggcgcattaggtactacgcttgtcgtaggacaattattagataaaaaattattacaacaatattttggtaaagatcgatttagattattcagtggttggtattacttaattaagtatgcgatgcctgtcgttattattttagtctttatcgtgcaattatttagttaatatatagaagcatctgacacacaagtatttgtgttgctcaggtgtttttttgtttggaattgaaaagtttgtactggttttgaattaatcgaaacttagataattgcaaaataacaaaatgtcgtttataattcttatctgaaaagtaagaattaaaattgagacatgaagaaaggtttcattcatttgatcggcatgtcagatgagggtgcatctatgattacttatgatttaattggcaatacaccattagtactgttagaacattatagtgatgataaagttaaaatttatgccaagcttgaacaatggaatcctggaggcagtgttaaagacagactcgggaaatatttagtagagatggcaattcaagaagggcgtgtgcgtgcaggtcaaactattgttgaagcgactgctggcaatacaggcatagggttagctattgcagcaaatagacatcatttgaaatgtaagatctttgcgccgtatggtttttcagaagaaaagattaatattatgatagcgcttggtgcagatgtttcaagaacgagtcagtctgaaggtatgcatggggcacaattagctgcacgttcctatgctgaaaaatatggtgccgtttatatgaatcaatttgaatccgaacataatccggatacatattttcatacattgggacctgaattgacttctgcattacagcaaattgattattttgtggctggtattggctctggtggtacatttacaggtaccgcacgttatttaaagcaacatcacgtgcaatgttatgccgttgagccagaagggtccgtgttaaatggagggccagctcatgcacatgacactgaaggtatcggttctgagaaatggccgatatttttagaaagaagtcttgtagatgggatatttacgattaaagaccaagatgcctttcgaaatgtcaaaagtttggcaaagcatgaaggattactggtaggcagttcttcaggtgcagcattacaaggtgcattgaatttaaaagcgcaattatctgaaggtacgattgttgtcgtatttccagatggtagtgatcgatatatgtctaaggaaatatttaattatgaggagaatgattatgaataagaaaacgaaattaattcacggtggacacacaacggacgactatacaggtgcagttacaacaccaatttatcaaacaagtacatatttacaagatgatattggtgatttacgtcaaggatatgaatattctcgtactgcgaatccaacaagaagttctgtagaaagcgttattgcggcattagaaaatggcaaacatggctttgcatttagttcaggtgttgcagcaatcagtgcagttgttatgctgttggacaaaggtgatcatattattttaaattcagatgtatacggcggtacttatcgcgcattgacaaaagtatttacacgatttggcattgaagtggattttgtagatacaacgaatacagattcaattgtacaagcgatacgcccaacaacaaagatgttgtttattgaaacaccttctaatccattattacgtgttactgacattaaaaagtctgctgaaattgcgaaagaacacggtttgatttcagtcgttgataacacatttatgacaccttattatcagaatccattagatttaggcatcgatattgtcttacattctgcaacgaaatatttaggtggacatagtgatgtcgttgctggtttagttgcaacatcggatgacaagcttgcagaacgtttagcatttatttcaaattcaacaggtggcattttaggacctcaagatagctatttacttgtgaggggtattaaaacattaggtttacgtatggaacaaattaatcgcagtgttattgaaattattaaaatgttacaagcacatccagctgtgcaacaagtgttccatccaagcattgaaagtcatttaaatcatgatgtccatatggctcaagcggatggccatacaggtgtgattgcatttgaagtggaagatacagaaagtgccaaacaattgattaaagcaacatcgtattacacattggctgaaagtttaggtgcagtagaaagtttaatttcagtacctgcattgatgacacatgcatctattccagcagatattcgagctaaagaaggtattacggacggacttgtaagaatttctgtaggtattgaagatactgaagatttagtggatgatttaaaacaagcactagatacgttataaataatagcagcactggcatatattttgagttcaacgtttgttgttcttgaatatgctagtgctttttttgtgcgatgttaatatttagtaattgcgttgtggacgtttggtggacatttttatggatttaattcgataaatgtcatagtagtctcacaagtcatcattatcacatgaattgcttattttttaattttttagaaaattcggcaaattgtattgacgatatatgcaattttacatataatgctcttattcctagtggattaataagaatttgtaggaggggcgatgatgattgagtttcgacaagttagtaaatcatttcataagaaaaagcaaacaatagatgctttgaaggacgtatcatttacggtcaatcgcaatgatatttttggtgtgattggatatagtggtgcaggaaaaagtacgttggtaagactcgtgaatcatcttgaagctgcctcgaatggacaagtgattgtagatggacatgatattacgaattatagcgataaaatgatgagggatattaagaaagatatcggtatgatatttcagcattttaatttactaaattcagctacggtatttaaaaatgtagctatgccgctcattttaagtaagaaaagcaaaacagaaattaagcaacgagtaacggaaatgcttgaatttgtaggattgagtgataaaaaagaccaatttcctgatgaattatctggtgggcagaagcaaagggtggctattgcaagagcgcttgttactaatccgaaaatactcctatgcgatgaagcaacaagcgcattggatccagcaacgactgcttcgatattgacgttattaaagaatgtcaatcaaacctttggcattacaattatgatgattacacatgaaatgcgcgttattaaagacatttgtaatcgtgttgctgtaatggaaaaggggcaagtggttgaaacagggactgttaaagaggtatttagtcaccctaaaacgacgattgctcaaaattttgtgtctacagttatacagactgagccaagtacgtcattgattcgtcgattgaatgacgaacaagttggcgattttaaagattataaaatcttcgtcgaggaaactcaggtgacacaaccgattataaatgacttgattcaaatttgtggtggagaggttaaaattttattttcatctatgtcagaaatacaaggtaacaccgtatgttatatgtggcttcgatttaatatggatcaacaatttgatgacacggcaataaatcaatatttcaaagagaaaaatattcaatttgaggaggtgcattaacatatgtttggttctgatttagacagtgcacagttattacaagcattatacgaaacgttatatatggtatctattgctttatttttaggagcagtgattggtattccattaggtgtcttattggtaattactcgaaaacaaggcatatggcccaatatagtgatacatcaagttttaaatcctttaatcaatattttaaggtcactaccatttattattttgttaattgcgattgtgccattcacaaaattagtagtaggtacttcaattggtacgactgctgccatcgtacctttaactgtatatgtggcaccttacattgcaagacttgttgaaaactcattattggaagtagacgaggggattattgaagcggcgaaagcgatgggcgcttcaccactacaaatcattagatattttttaattcctgaagcgttaggttcattagtattagcaattaccactgcgattattggacttattggaagtacggcgatggcaggagctgttggcggtggtggtataggagacttagctttagtgtatggttatcaaagatttgatacgacggtcattattattactgttattgtattagtcattattgtccaagtgattcaaacgctagggaatgtcctagctagattcatacgtagacattaatgatatatagtgaatattttgaaaggaattgatagaatgaaaagattgattgggttagttatcgtaacacttgtattattagcagcgtgtggtagtaacaatgataaaaaagtaacaattggtgtcgcatcaaatgacactaaggcttgggagaaggttaaagaattagctaaaaaagatgatattgatgtggagattaagcacttctccgattacaatttaccgaataaagcattaaacgatggtgatattgatatgaatgcattccaacattttgcatttttagatcaatataaaaaggcgcataaaggaacaaagatttcagcattaagtacaacagttttggcaccgttgggtatttattcggataaaattaaagatatcaaaaaggttaaagatggtgctaaagttgtcattccaaatgatgtatcaaaccaagcacgtgcacttaaactattagaagcagctggtttaataaaactgaaaaaagatttcggattagcaggtacagtgaaagatataacgtcaaatccaaaacatttaaaaattactgcagtagatgcacaacaaactgcacgtgctttatctgatgtcgatattgcagttattaataacggtgtagcaactaaagcgggtaaaaatccaaaaaatgatccgattttcttggaaaaatcagattcagatgctgtaaagccatatattaatattgttgcagttaacgacaaagacttggataacaaaacatatgctaaaatcgtagaattgtatcattcaaaagaagctcaaaaagcgttgcaggaagatgtcaaagatggagagaaacctgttaatttatctaaagatgagattaaggcaatagaaacgtcattagcaaaataaattatattgcgtcctacaagcaaagttcatgcttatgtttgtagggcgttattgtttgagaataaaattatttccagtagagaaagagattgtaatcattttatagtgaaatattatgaaattgtaataatttagatattgtaaaatctaataagttgtaataattttaaggggtaattataaaatttgatgatacagtatatgatttttttgtaatcataatgtcatcaaacatcaacctattatacataataaaatcgtataatgatgtagtattcataaattcggataaaagaatgttaggaaagttaagcaagaggaggattttaaagtgcaaaaaaaagtaattgcagctattattgggacaagcgcgattagcgctgttgcggcaactcaagcaaatgcggctacaactcacacagtaaaaccgggtgaatcagtgtgggcaatttcaaataagtatgggatttcgattgctaaattaaagtcattaaacaatttaacatctaatctaattttcccaaaccaagtactaaaagtatctggctcaagtaattctacgagtaatagtagccgtccatcaacgaactcaggtggcggatcatactacacagtacaagcaggcgactcattatcattaatcgcatcaaaatatggtacaacttaccaaacattatgcgacttaatggtttaaataatttctttatttatccaggtcaaaaattaaaagtatcaggtactgctagctcaagtaacgctgcgagcaatagtagccgtccatcaacgaactcaggcggtggatcatactacacagtacaagcaggtgactcattgtcattaatcgcatcaaaatatggtacaacttatcgaaaaattatgagcttaaatggcttaaataatttctttatttatccgggtcaaaaattgaaagtaactggtaatgcatcttcaaactcagcatctgcaacaactacgaatagaggttacaatacaccagtattcagtcatcaaaacttatatacatggggtcaatgtacatatcatgtatttaatcgtcgtgctgaaattggtaaaggtattagtacttattggtggaatgctaataactgggataacgcagcggcagcagatggttacactatcgacaatagacctactgtaggttctatcgctcaaacagatgtaggttactatggtcatgttatgtttgtagaacgtgtaaataacgatggtagtattttagtttcagaaatgaactattcagctgcaccaggtattttaacttacagaacggtaccagcttaccaagtaaataattatagatatattcactaaagtcttacgtatataaatatatataatgaattcctattacatttcacaagctgaaaagttggattgaatcctaaactttatggcggggctatcaaagtcgtgattgttgtaataggaatttttgtataagaaaaaggattggtcgaatgaacttcatgttctatgttcgaccaatccttttctgatttagtattcatgctttactttgcgaatgcttgtaaataatctagcaccgtttgttattaaagtaacaactgccactgcttttttgaacttacgtggtgacttaattgaaatgtaaaagtctaacacggttcctacagtgcttaaacctaatgaaagatatactaattttttatttttagcatgatatttatagccattgtagccgtcgactatgaaacctgcgacatttagtaaacttgataaacgttgtgatttggaacgttttgccataataataattccccctagtatcttctgtttatatggaaaaattgggtgcgctgaattgctaacgttttgcgctataactacttatatatgataacataattgtacagtataatttgaaaaattgatttcacaaagttggggtgtcaaagatgattaaatgtgtctgtttagttgaagaaacagctgataaaatattgcttgttcaagtaaggaatcgcgaaaagtattatttcccaggtggtaaaatagaagaaggggaatcacaagtacacgcgctgttaagagaagtaaaagaagaattaaatttaacattaacaatggatgaaattgaacatatcgggacaattgtaggtcctgcatatccacaacaggatatgttaactgagttaaatggatttcgcgcattaaccaaaatcgattgggaaaacgtaactatcaataatgaaattacagatatacgctggattgataaagataatgatgcgttgattgcgcctgctgtcaaagtttggattgaaacgtatggtggtaaacatgacaaataatgacactatcatgttacgacattatgtcccacaggattattcgatgttagaagcttttcaattaagtgaaagtgatttgaagtttgttaaaacgccagaggaaaatattacagctgcaatgtctgataatgaaaggtatcccatcgttgtaatggatgacaggcaatgtgtggccttttttacattacatcgtggaaaaggggtcgcaccatttagcgataaccaagatgcagtatttttcaggtcatttagtgttgatcaacgttatcgtaatagaggaataggtaaagtggtaatggaaaaattggcgtcatttatcacttcaacatttcaggatattaatgagattgtgttaacggttaatactgacaatccacatgccatggcactttatcgccaacaaggatatcaatatatgggagatagtatgttcgtcggaagacctgttcatattatggcgctaactataaaataaattaaatttaaaagcatctttactcatcgtcgaccacaacaattaatgatgaataaaggtgctttttgttatagaccaccggacaatttactatagtaaaaagcgacctagtgaacaattgacatatatccacaggtcgcttaacttaagttatattgctagttgcgattaattgatagactcatcatttttgcgctgtcgagatggtctttttattaaaaatgccgtaatccaagccgtaatcggaatactgattgcaacggcaataccgcctaaaataatagaaataaattcttgggcaaatattttcgagtttataatatggccaaatgaatatttaagtttgaaaaaccaaataaataaagcaagttggccaccaaaaaaggcaaggtaaatcgtgttcgcagatgtcgctaaaatttctctaccaacacgcatgccagattggaataattcgtattgcgtaagtgttggattcacttgatgcaattcataaatgggtgaactaatggtaatcgttaaatctatcacagctgcaataacagcaagaataatagtgaacaccataaattgaaccatatcaatgccaatattcattgaatacacatatgtttcatcttgttgttcggttgaaaagccttgtagatgaccgaagtagaccgataaataaatgagtgtaatcaacaatattgttgtaacgatagtgctgataaatgcagcttgtgttttaacattgtaactattgagtacgaataaattacaagcgccaataataatgcagaaaaagaatgtgacgacataaatcggtacgccaaaaataatcaatacaatactaataattaaaatagcaaaatttaaaaatagggttaaataagagatgaatccctttttacctccgaaaattatcatcagaaagaggagcaataacgccaatataaatacagcattcattgtttcgccctccttaatgattcaaatatttccataaacaatattgtgataggaattgtaagtacgatacctataccacctgttagtgcgcgcgcaatttctaacgaccaattcatcgaaatagtataagtcactgtattggcattttttaaaaagattaaaaacataggtagtgcaccggataaatatgagaataataagatgttagtcattgttcccataatatcttggccgatgtttcgcccagcaagcgcccatctcctcattgaaatgtgcggcgtacgctgtaaaatttcatgcataccactagcaattgtaattgcaacatccataatagcgccaagtgaacctattaacactgaggctaggaagatatctttcggtggtaatgataaaaaattcatcgtttcatatttaatgcctttaccatctgtcatatatatgattaattctgttaaacctatactcaaaaaagttccgataattgtacttgctacggtaatgagtgtacgcatatgccagcctgtaacgagcaataaagtgagtattgttgaacaaatcatggcaatggtcatgagtaagaataaattaatattgctatgttgaatatgaatgtaaattgcgattaatatggcaatagaattcaagattaacgataaaatcgattgcagtccgactttgcgaccaaccaataatacagttaataagaacaaaccagtgatgataaccgttaaggtatcacgcttcttttctataatataagcatcactcggcttgttagaaatatgtaataatactttttcgtgtgtgcgaaatgcttctgaatctgcttgagatttgacgtactgatgattaatcgtcgtcgtttctccagcaaattgaccatttaatattttgacttttaattgatttttatacttagtatcgcggttattttgtgcatcttttgtaggtgtcgatgaaacgtgtttgacatctataatttgaccaattggtttgttgtaaaagttctcattattgaatgtaaataaaatagcaccaatgaatgcgatgcagaacaaacctaaaattatattaaatggctttgtaaataaatttctatatttcaaaaacaaaaccccaattctatgaatgaattaatatggtgattatacgcccttaattttttattttcaaagatattactgtgaagtgtaaaacgaaaatcatcattgatagcgtcgaattacttaatggaatgtagacgttttagtcattaattgctgaatgagtgttaataagataccaatatcactcttcgtataaggttctttcgtaatagcacatatcgttctttttaattcagtatgatctaattttatatctatccatgatttagattctggtaaatgtatattttgtgatgaaatgatgtaaccttctttttgacgaaggagatactgcgcaagtggttggctactgattgtgtatacatctgatttagtaatcttacgcaattgcttttttacagattcggcaaatggtgccaagcaataaatatgactatgctcaaactgaattaatggtgggtgtgtcgccatcgtgattggatcgtctgaaggcgcatataaatgatagtgctcttcgaataaaggtagcatatgtaattgtttgtgtttacgtatttctggtgtaagttccgtgaaaccaatgtctatattcccatttaatacgctatttataatcgtgtcatgatctaataagttcggtatgacatgtgtatcattttgtaaatgaaacgtttggataagtggtagtaacatgtgggatacgtcactctcatcatagccaatgtagatacttttatttttagttaatccatggctttgaaattgttcaatcgtgctatctaaatgttcaataatacgcagagcttcattaaataataatttcccttcagatgtgagcgtaatattacgtccttgctttttaaataaagacacattaagttcttgttctaataatgtaatttgacggcttatcgctgattgagcaatgtttagttcaagtgctgtttcggagatatgttctcttttagcgacctcgataaaatatcttaattgtttaatttccatagcgatataggcacctccgaaaatgagtgttttgtaactattatagcaatattattgataaatgttctattttttagatgaatatcttctattttatatattgaacagataaattttttagattatagtaattatcattaataactaatatcagaatattctaaaaaaggggtgtgcatcatgcacaatgagaaattaattaaaggcttatatgactatcgtgaggaacatgatgcgtgtggtattggtttttatgcgaatatggacaataaaaggtctcacgacatcattgataaatcgcttgaaatgttgcgacgtttagatcacaggggcggggtcggcgcagatggcatcactggtgatggcgcaggtattatgactgaaataccttttgcatttttcaaacaacatgtaacggactttgaaatcccaggtgaaggtgaatatgccgtggggttatttttttccaaagaacgcgttttaggttctgaacatgaaccagtttttaaaaaatattttgaaggcgaagggttatcaattcttggttatcgtaatgtaccagttaataaagatgccattgctaaacatgtagcagatacgatgccagtcattcaacaagtgtttattgatattagggacattgaagatgttgaaaagcgtttgtttttagcgagaaaacaattagagttctattcgactcagtgcgatttagaattatattttacgagcttatcacgcaaaacaattgtatataaaggttggttacgatcagaccaaattaaaaaactctatacagatttatcggatgatttatatcaatcaaagctagggttagtgcattcgagatttagtacgaatacattcccgagttggaaaagggcacatcctaaccgtatgttaatgcataatggtgagattaacacgataaaaggtaatgtgaactggatgcgagcacgccaacataaattaatcgaaacattatttggcgaggatcaacataaagtgtttcaaattgtcgatgaggatggtagtgactctgccattgtagataatgcgctagagttcttatcgttagccatggaaccagaaaaggcagcgatgctactcatacctgaaccttggttatataatgaagcgaatgatgcaaatgtacgtgcgttttatgaattttatagttatttaatggaaccgtgggatggtcctacaatgatttcgttctgtaacggtgacaaacttggcgcgcttacagatagaaatggattacgtccaggtcgttatacgattactaaagataactttattgtcttttcatctgaagtgggtgttgtggacgtacctgaaagtaatgttgcttttaaaggtcaattgaatcctggaaagttattgcttgttgattttaaacagaataaagtcattgaaaataatgatttaaaaggtgcgattgctggagaattaccatataaagcgtggattgataaccataaagttgattttgattttgaaaatatacaatatcaagattcgcaatggaaagatgaaacgttatttaaattacaacgtcaatttgcatacacgaaagaagagattcataagtatattcaggaacttgtagaaggtaagaaggatcctatcggtgcaatgggatatgatgcgccaattgcagtgttgaacgagcgaccagaatcactatttaattactttaaacagttgtttgcacaagttacgaatccaccaattgatgcgtatcgtgaaaaaatcgtaacgagtgaactttcttatttaggtggcgaaggtaacttattagcacctgacgaaacggttttagatcgaattcaattgaagagaccggtattgaatgaatcacacttagcagcgattgatcaggagcattttaaattaacatatttatcaacggtatataaaggggatttggaagatgcgctagaagcattaggccgagaagcagtggatgctgtaaagcaaggcgctcaaattcttgtgttagatgatagtggattagttgatggcaatggctttgcaatgccgatgttactcgcaataagtcatgtgcatcaattacttattaaagcagatttacgtatgtctacaagtttagtcgctaaatctggtgagacacgagaagtgcatcatgttgcttgtttactagcatatggcgcgaatgcaattgtgccatacctagcgcaacgtacagttgaacaactgacattgacagaagggttacaaggcaccgttgtcgataatgttaagacatatacggatgtattatcggaaggtgtcattaaagtaatggcgaagatgggaatttcgacagtgcaaagttatcaaggtgcacaaatatttgaagcgattggcttgtctcatgatgtgattgatcgttattttactggaacacagtctaagttatctggtatttcgattgatcaaattgatgctgaaaataaagcacgtcaacaaagtgatgataattatcttgcatcaggtagtacattccaatggagacaacaaggtcaacatcatgcttttaatccggaatctattttcttattgcagcacgcatgtaaagaaaatgactatgcgcaatttaaagcatactctgaagcggtaaacaaaaatagaacagatcacattagacatttacttgaatttaaagcatgtacaccgattgacatcgaccaagttgaaccggtgagtgacattgtcaaacgctttaatacaggggcgatgagttatggatcgatttcagcggaagcacatgaaacgttagcacaagccatgaaccaattaggtggaaagagtaatagtggtgaaggtggcgaagatgcaaaacgttatgaagtacaagttgatggaagcaacaaagtaagtgcgattaaacaagtcgcttctggacgttttggtgtaactagtgattatttacaacatgccaaagaaattcaaattaaagttgcgcaaggtgcaaagcctggtgaaggtggtcaattacctggtactaaggtatatccgtggattgcgaagacaagagggtcaacgccaggtatcggtctgatttcaccaccgccacatcatgatatttattcaatagaagatttagcgcaactgatacatgatttgaaaaatgcgaataaagatgcagatatcgcggtaaaattagtttcgaaaacaggtgttggtaccattgcatctggggtggcaaaagcatttgcagataaaattgtcatcagtggttacgatggtggtacaggggcttcacctaaaacgagtattcagcatgccggtgttccttgggagattggtttaacagaaacacatcaaacattaaaactaaatgacttaagaagtcgtgttaagttagaaacagacggtaagttattaactggtaaagatgtagcgtacgcatgtgcgcttggagcggaagaatttggatttgcaactgcaccattagtggtgttgggctgtattatgatgcgtgtatgccataaagatacatgtccagtaggagttgcaactcaaaacaaagatttacgtgctttatatagaggtaaagcacatcatgttgttaattttatgcattttattgcacaagaattaagagaaattttagcatctttaggtttgaaacgtgtagaagacttagttggaagaactgatttattacaacgatcatcaacattaaaagcgaatagcaaagcggctagtattgatgttgaaaaactgttatgtcctttcgatgggccaaacacaaaagaaattcaacaaaatcataatcttgagcatggatttgatttaacaaatttatatgagataacgaagccatatattgctgaaggacgtcgctatacaggtagctttacagtaaataatgaacaacgtgatgtaggggttattacaggtagtgagatttcgaaacaatatggagaagcaggacttcctgaaaatacaattaatgtttatacgaatggtcatgctggtcaaagtcttgcagcatatgcaccgaaaggcttaatgattcatcatactggagatgcgaatgactatgttggtaaaggattatctggtggtacggtcattgtcaaagcaccttttgaagaacgacaaaatgaaattattgctggtaacgtctcattctatggtgcgacaggtggtaaggcatttattaacggtagtgcaggagaaagattctgtattagaaatagtggtgtagatgttgtcgttgaaggtatcggcgaccatggattagagtacatgactggtggacatgtcattaatttaggtgatgtaggtaagaacttcggtcaaggtatgagtggtggtattgcttacgttatcccgtctgatgtagaagcttttgttgaaaataatcaactagatacgctttcgttttcaaaggttaaacaccaagaagaaaaagcattcattaagcaaatgctggaagaacatgtgtcacatacgaatagtacgagagcgattcatgtgttaaaacattttgatcgcattgaagatgtcgtcgttaaagttattcctaaagattatcaattaatgatgcaaaaaattcatttgcacaaatcattacatgacaatgaagatgaagcgatgttagctgcattttacgatgacagtaaaacaatcgacgctaaacataaaccagccgttgtgtattaaggaaagggggagatacgatgggcgaatttaaaggatttatgaagtatgacaaacagtacttaggtgaattatcactggtagaccgtttgaagcatcataaagcatatcaacaacgatttactaaagaagatgcctctatccaaggtgcacgatgtatggattgtggaacgccgttttgtcaaaccggacaacagtatggtagggaaacaataggttgtccaattggaaactacattcctgaatggaacgacttagtgtatcatcaagattttaaaactgcttatgaacgcttaagcgaaacaaataactttcctgactttacagggcgtgtatgtcctgcaccatgtgaaagtgcttgtgtgatgaagattaatagagaatcgattgcgattaaaggtattgaacgcacaattatagatgaagcttttgaaaatggttgggtagcgccgaaagttccgagtcgccgtagagatgaaaaagtagcaatcgttggaagcggtccagcaggattaactgctgctgaagaacttaatctactaggatatcaagtaactatttatgaacgtgctagagaatcaggcggcttattaatgtatggtattccgaatatgaaacttgataaagatgtggttcgacgtcgtattaagttaatggaagaagcgggcattactttcattaatggtgttgaagtaggcgttgatattgataaagcaacgttagaatctgagtatgatgccattatattatgtactggtgcacaaaaaggtagagatttacctttagaaggacgcatgggtgatggtatacatttcgctatggattatttaactgaacaaacgcaattgttaaatggagaaattgatgatataacaataactgcaaaagataagaatgtcattatcattggtgctggtgatacaggggcagactgtgtagcgacagcattaagagaaaattgtaagtcgattgttcaatttaataaatatacgaaattgccagaagcaattacatttacagaaaatgcatcatggcctttagcaatgccggtgtttaaaatggactatgcgcaccaagagtacgaagctaagtttggtaaggaaccacgtgcatatggtgttcaaacgatgcgttacgatgttgacgataaaggacacatacgtggtttgtatactcaaattttagagcaaggcgaaaatggtatggtcatgaaagaaggacctgaaagattttggcctgctgaccttgtattattatcaatcggcttcgaaggtacagaaccaacagtaccgaatgcttttaacattaaaacggatagaaatcgaatcgtggcggatgatacaaactatcaaactaataatgaaaaggtatttgctgctggagatgctagacgtggtcaaagtttagttgtatgggcaattaaagaaggtagaggcgtagcgaaagcagtagatcagtatttagcgagtaaagtttgtgtataatctttgtatggaaatggtggttacgttgacgttgtgtcatgctgaatcgagtttgaaataatctagtatctatcaacgtcacatgccatctttgtaacctaaaaacaaaggtttgtaagacaacaaatagattaattataagtagtgattttttaagtgcgttttataggtcaactgtagtggaagacaatgatttgtggtaatcatgtaatgcttaaaaacaatattgacttttacagaacgttcatatatgataaatattgtgtttaggaggaatacccaagtccggctgaagggatcggtcttgaaaaccgacaggggcttaacggctcgcgggggttcgaatccctcttcctccgccatcaatatttatattaaatactatatataaaaaaggtaagtacttaaagtttgagtgtttaccttttttatatgcctttgaatgactcgtatttttgataatagaaatgataaggcattgagattggaagggcatttggcttgtgcaatatacatagctaaatgtcttttttgttttgtgaaatatgatggatggcttgtgtgggcaagtttgctatttgtagatatgcatttttcaatttaggagttggccatgcatttacactttataatggcgagagcgtggtgaggtattgttaataacacaattgtagcgaggggttattgctacatatgtcgttatggctcattgattttctgaaatggctacaccagataattgtgacaaaataaaaatatttcgttgaaagcctttacataacttgtctagacaagttatactcgttttaagacattaagggagtgaaatatatggctgtaaaaagagaagatgtaaaagccatcgtaaccgctattgggggaaaagaaaatcttgaagctgcaacgcattgtgtaacacgattacgtttagtgctgaaggatgaaagtaaagttgataaagacgcattaagtaataacgcgttggtcaaggggcagttcaaagcagaccatcaatatcaaattgtcattggtccaggaacagtcgatgaagtgtataagcagtttattgatgaaacaggtgctcaagaagcttcgaaagatgaagcgaaacaagcagctgcgcaaaaagggaatccagtacaacgtttaatcaaattgttgggggatatttttataccaatattacctgcgattgtgacagctggtttgttaatggggatcaataatttacttacaatgaaaggtttatttggtccaaaagcacttattgagatatatccacaaattgctgatatttcaaacatcattaatgtgattgcgagtacggcatttattttcttaccagcattaattggttggagtagtatgcgtgtatttggtggtagtccgattctaggtttagtcttaggtttgattttaatgcacccgcaattagtatctcagtatgatttggcaaaagggaatattccgacgtggaacttatttggcttagagattaagcagttgaattaccaaggtcaagtgttgccagttttaattgcagcttatgttctagctaaaattgaaaaaggattaaataaagtcgttcacgattcgataaaaatgttggtcgttggccccgtagcgcttttagttactggatttttagcatttattatcattggaccagttgcattattgattggtacaggtattacatctggtgttacatttatattccaacatgcaggatggcttggcggagcaatatatggattgttatatgcaccacttgtaattacaggactacaccatatgtttttagcagtagatttccaattgatgggtagcagcttaggtggtacgtacttatggccaatcgttgcgatttcaaatatttgtcaggggtctgcagcatttggcgcatggtttgtctataaacgtcgtaaaatggttaaagaagaaggcttggcattaacatctggtatttctggtatgttaggtgttactgaaccagctatgtttggtgtgaacttacctctgaaatatccatttatcgctgcgatatcaacgtcttgtgtattgggggcaatcgttggtatgaataacgtacttggaaaagttggtgttggtggcgtgccagcattcatttcaattcaaaaagaattttggccagtatatcttattgtgacagctattgctattgttgtaccatgtatactaacaattgtgatgtctcattttagtaaacaaaaagcgaaagaaattgttgaagattaataaaataaaaaaggggcgttcgttatttggacgtcctttattacgttataaggtggtaattgtgtgtcgaaagaaatagattggagaaaatccgttgtatatcaaatttatcctaagtcgtttaatgatacgacggggaatggtataggagatattaacggaattatagaaaaattggattatatcaagttattgggtgttgattatatttggttaacaccagtgtatgaatcaccgatgaatgataatggctatgatatcagcaattatttagaaatcaatgaagactttggaacgatggatgattttgaaaagttaatcaaagttgctcatcaaaaagacttgaaagtgatgttagatattgtcattaatcatacgtcgacggagcatgaatggtttaaagaagcccgtaaatctaaagacaactcttatagagattattactttttcagatcatctgaagacggaccgccaacaaattggcattctaaatttggtggtaatgcatggaagtatgattctgagacagatgaatattatttacatttatttgatgccagtcaagctgatttaaattgggataatccggaagtacgtcaatcgttatatcgcattgtcaatcattggatagacttcggcgttgatggttttcgatttgatgtcattaacttaatttctaaaggtgaatttaaggactctgacaaaataggtaaagaattttatacggatggtcctagagtgcatgagtttctgcatgaattaaatcgtcaaacgtttggtaacactgacatgatgactgtaggagaaatgtcttcgacgacgattgaaaattgtattaagtatacacagccagaacgccaagaattgaatagtgtttttaattttcatcatctaaaggttgattatgttgatggtgaaaagtggacaaatgcgaagcttgattttcataagttaaaggaaattctgatgcaatggcaacgaggtatttatgacggtggcggatggaacgcgattttctggtgtaatcatgatcagccacgggtagtgtctagatttggtgatgatacgtcggaagagatgaggatacaaagtgctaaaatgttagctatcgcactgcatatgttgcaagggacgccatatatttaccaaggtgaagaaattggtatgacggatccacattttacatcaatagcacaatatcgtgatgttgaatcgattaatgcctaccatcagttgttaagtgaagggcatgctgaagcggatgtgttagcgattttaggacagaagtcacgagacaattcgagaacgcctatgcaatggagtgatgatgttaatgctggatttacagctggtaagccttggattgatatttcggaaaattatcatcaggtcaacgttagacaagcactaaaggataaagagtctattttctacacgtatcaaaaattaatacaattaagacatacgcatgatattattacgtatggagacattgtgccacgttttatggatcatgatcatttatttgtttatgaacgtcattataagaatcaacaatggctagtaattgcgaatttctcagcatcggctgttgatttgccagaaggattggcgtgcgaaggtcgtgttgtgattcaaacaggcacagtggaaaataatacgataagcgggtttggtgcaattgtaatcgaaacaaacgcgtaaaataaattgagtggatgcgtttatatgatgaagcaaaagaagtttatgaagatttatgaggcgttgaaagaagatatactaaacgggcagattcaatatggtgaacaaattccatctgaacatgatttggtgcaattgtaccagtcatctcgagagaccgtgcgtaaggcattagatttgttggcattagacggtatgattcaaaagattcatggtaaagggtcacttgtcatttatcaggaggttacagagtttccattttctgaacttgttagctttaaagaaatgcaagaagaaatgggtgtcgcatatttaactgaagttgttgtgaatgaggttgttgaagcgcataaagttccagaagttcaacatgctttaaacatcaattctagtgaatcactcattcatattgttagaactcgtcggcttaaccaacatgtgaagattgctgatgaagattattttctaaagtcgattgtttcagatataggtaatgatgttgcgagtgattctatttatgattatttggaaaaggtattaaatcttaatattagttattcaagtaagtctattacttttgaaccgtttgatgaacaagcatatcaattgtttggtgatgtatcggtggcttattcagcaacagttcgaagtattgtgtatttagaaaatacaatgccgtttcaatataatatttcaaaacatcttgcaaatgaatttaaatttaatgacttctcaagacgtcgtacaaagtaaacaatgatataaatgatttatacttgcaattaactattaaaatatagtaatatatatcttgccgtgctaggtggggaggtagcggttccctgtactcgaaatccgctttatgcgaggcttaattcctttgttgaggccgtatttttgcgaagtctgcccaaagcacgtagtgtttgaagatttcggtcctatgcaatatgaacccatgaaccatgtcaggtcctgacggaagcagcattaagtggatcatcatatgtgccgtagggtagccgagatttagctaacgactttggttacgttcgtgaattacgttcgatgcttaggtgcacggttttttatttttaaaaatattaaaccgattattaagagttgaaaatatatatttatagaagctactttcttgaagacaattcagcgtattatacgtggaacatgtttggggaagtagcttttttatatgtgaagtttgattcaagtgaaatcgatgcgcagtttgaatgattttttacggatataaaaagtaagaagttattaattgatgataaagaaatgatggtgaaatgagggggagtatcttacaatagaattattaatgagatacgttatgattattgacaatcaaatccctacggaggacatatgcaaatatatttaagtactttaacagagttagattatgataaatctttaaatagtattgaagaaagttttgatgataatcctgaaacgagttggcaagcacgtgcgaaagtgaaacatttaaggaaatctctttgctataattttgaattagaagtaatagcgaaaaatgaaaataacgatgtcgttggacacgttttattaattgaagtagaaatgaatagtgatgacaagacgtattatggtttggcgattgcctctttatcagttcatcctgaattacgtggacaaaaattaggtcgtggattggttcaagcagtagaagaacgtgcaaaagcgcaagagtatagtacggttgttgtagaccattgttttgactactttgaaaagttgggttatcagaatgctgctgagcatgacattaaattagaatctggtgatgcaccgttacttgtaaaatatttatgggataatttgacggatgcaccacacggaatcgtaaaatttccagaacatttttattaattgttcatttaagaagtaaaggtattatcatgctataatgaaaggtaattgtttatggaggtgctaacttgaattatcaagccttatatcgtatgtacagaccccaaagtttcgaggatgtcgtcggacaagaacatgtcacgaagacattgcgcaatgcgatttcgaaagaaaaacagtcgcatgcatatatttttagtggtccgagaggtacgggaaaaacgagtattgccaaagtgtttgctaaagcaatcaactgtttaaatagcactgatggagaaccttgtaatgaatgtcatatttgtaaaggcattacgcaggggactaattcagatgtgatagaaattgatgctgctagtaataatggcgttgatgaaataagaaatattagagacaaagttaaatatgcaccaagtgaatcgaaatataaagtttatattatagatgaggtgcacatgctaacaacaggtgcttttaatgcccttttaaagacgttagaagaacctccagcacacgctatttttatattggcaacgacagaaccacataaaattcctccaacaatcatttctagggcacaacgttttgattttaaagcaattagcctagatcaaattgttgaacgtttaaaatttgtagcagatgcacaacaaattgaatgtgaagatgaagccttggcatttatcgctaaagcgtctgaagggggtatgcgtgatgcattaagtattatggatcaggctattgctttcggcgatggcacattgacattacaagatgccctaaatgttacgggtagcgttcatgatgaagcgttggatcacttgtttgatgatattgtacaaggtgacgtacaagcatcttttaaaaaataccatcagtttataacagaaggtaaagaagtgaatcgcctaataaatgatatgatttattttgtcagagatacgattatgaataaaacatctgagaaagatactgagtatcgagcactgatgaacttagaattagatatgttatatcaaatgattgatcttattaatgatacattagtgtcgattcgttttagtgtgaatcaaaacgttcattttgaagtgttgttagtaaaattagctgagcagattaagggtcaaccacaagtgattgcgaatgtagctgaaccagcacaaattgcttcatcgccaaacacagatgtattgttgcaacgtatggaacagttagagcaagaactaaaaacactaaaagcacaaggagtgagtgtcgctcctgctcaaaaatcttcgaaaaagcctgcgagaggtatacaaaaatctaaaaatgcattttcaatgcaacaaattgcaaaagtgctagataaagcgaataaggcagatatcaaattgttgaaagatcattggcaagaagtgattgatcatgccaaaaacaatgataaaaaatcactcgttagtttattgcaaaattcggaacctgtggcggcaagtgaagatcacgtacttgtgaaatttgaggaagagatccattgtgaaatcgtcaataaagacgacgagaaacgtagtagtatagaaagtgttgtatgtaatatcgttaataaaaacgttaaagttgttggtgtaccatcagatcaatggcaaagagttcgaacggagtatttacaaaatcgtaaaaacgaaggcgatgatatgccaaagcaacaagcgcaacaaacagatattgctcaaaaagcaaaagatcttttcggtgaagaaactgtacatgtgatagatgaagagtgatacatgacaagcgatataatcgtatgtataatgaaagaaacatcattttattgataaatatttattgattttcaaggaggaaatggaatatgcgcggtggcggaaacatgcaacaaatgatgaaacaaatgcaaaaaatgcaaaagaaaatggctcaagaacaagaaaaacttaaagaagagcgtattgtaggaacagctggcggtggcatggttgcagttactgtaactggtcataaagaagttgtcgacgttgaaatcaaagaagaagctgtagacccagatgatattgaaatgctacaagacttagtgttagcagctactaatgaagcgatgaataaagctgatgagcttactcaagaacgtttaggtaaacatactcaaggcttaaacatccctggaatgtgatcatagatgcattatccagaacctatatcaaagcttattgatagctttatgaaattgccaggcattggtccaaagacagcccaacgtctggcttttcataccttagatatgaaagaagacgatgttgttcagtttgccaaagcattagtagatgttaagagagaattaacatattgtagcgtatgtggtcacattactgaaaatgatccatgttatatttgtgaagataagcaaagagatcgttcagttatttgtgttgtggaagatgacaaagatgtcatagctatggaaaaaatgagagaatacaaaggtttatatcacgttttacatgggtctatttcgcctatggatggaattggaccagaagatattaatattccttcattgattgaacgcttgaaaaacgatgaagttagcgaattaatcttagctatgaacccgaacttagaaggggaatctacagccatgtatatttctagattagttaagcctataggtatcaaagtgacgagattagcacaagggttatcggtaggtggcgatttagagtatgctgacgaagtaacattatctaaagcaatcgcaggtagaacagaaatgtaatgtcttctattaaacatttttgaatttaatactatagtaagaaaagtcacagtgtaatcattgtggctttttttatggtgaggtgtactactttatttgtggtgtgttggtggcatggtttagctagttttactgagggtggggaatatttaggaagcaagccgttggttgtgatttgttacttttaatagtaatgattcgaattggattatcgaagtaggaataccgttatggtgtgttggtgttattaatttgataaatgcggttgatggttaatgactatgcaaatgaaattcttttgtaattgaaatgatagatgctggcttagtagttgtacttctttggtctaaagcttattaaatcagcctgtatagcggtgttttgagagattatttaaaacttgtaaatttatttttaatttctggtaaaaaaataacgttctgttttgcgggttttttattatcttttcataaaaataaccaccttatttgttttagaaaacgtactattcacaattgtaatttctttaagttcgatttttagaatgagagcgttcagaatggatagtgaaggtgtaatttttactgttgttaagcagtttgaaagcctgtatagtatttatttgttgaggcaaacaaaacaactcaacttaagaaataacttgaattactaacgaaaattaattttaaaaagttgttgacttaaatgttaataaaatgtataattaattcttgtcggtaagaaaaatgaacattgaaaactgaatgacaatatgtcaacgttaattccaaaaacgtaactattagttacaaacattatttagtatttatgagctaatcaaacatcataatttttatggagagtttgatcctggctcaggatgaacgctggcggcgtgcctaatacatgcaagtcgagcgaacggacgagaagcttgcttctctgatgttagcggcggacgggtgagtaacacgtggataacctacctataagactgggataacttcgggaaaccggagctaataccggataatattttgaaccgcatggttcaaaagtgaaagacggtcttgctgtcacttatagatggatccgcgctgcattagctagttggtaaggtaacggctaaccaaggcaacgatgcatagccgacctgagagggtgatcggccacactggaactgagacacggtccagactcctacgggaggcagcagtagggaatcttccgcaatgggcgaaagcctgacggagcaacgccgcgtgagtgatgaaggtcttcggatcgtaaaactctgttattagggaagaacatatgtgtaagtaactgtgcacatcttgacggtacctaatcagaaagccacggctaactacgtgccagcagccgcggtaatacgtaggtggcaagcgttatccggaattattgggcgtaaagcgcgcgtaggcggttttttaagtctgatgtgaaagcccacggctcaaccgtggagggtcattggaaactggaaaacttgagtgcagaagaggaaagtggaattccatgtgtagcggtgaaatgcgcagagatatggaggaacaccagtggcgaaggcgactttctggtctgtaactgacgctgatgtgcgaaagcgtggggatcaaacaggattagataccctggtagtccacgccgtaaacgatgagtgctaagtgttagggggtttccgccccttagtgctgcagctaacgcattaagcactccgcctggggagtacgaccgcaaggttgaaactcaaaggaattgacggggacccgcacaagcggtggagcatgtggtttaattcgaagcaacgcgaagaaccttaccaaatcttgacatcctttgacaactctagagatagagccttccccttcgggggacaaagtgacaggtggtgcatggttgtcgtcagctcgtgtcgtgagatgttgggttaagtcccgcaacgagcgcaacccttaagcttagttgccatcattaagttgggcactctaagttgactgccggtgacaaaccggaggaaggtggggatgacgtcaaatcatcatgccccttatgatttgggctacacacgtgctaccatggacaatacaaagggcagcgaaaccgcgaggtcaagcaaatcccataaagttgttctcagttcggattgtagtctgcaactcgactacatgaagctggaatcgctagtaatcgtagatcagcatgctacggtgaatacgttcccgggtcttgtacacaccgcccgtcacaccacgagagtttgtaacacccgaagccggtggagtaaccttttaggagctagccgtcgaaggtgggacaaatgattggggtgaagtcgtaacaaggtagccgtatcggaaggtgcggctggatcacctcctttctaaggatatattcggaacatcttcagaagatgcggaataacgtgacatattgtattcagttttgaatgtttatttaacattcaaatattttttggttaaagtgatattgcttttgaaaataaagcagtatgcgagcacttgactaaaaagaaattgtacattgaaaactagataagtaagtaaaatatagattttaccaagcaaaaccgagtgaataaagagttttaaataagcttgaattcataagaaataatcgctagtgttcgaaagaacactcacaagattaataacgcgtttaaatctttttataaaagaacgtaacttcatgttaacgtttgacttataaaaatggtggaaacatagattaagttattaagggcgcacggtggatgccttggcactagaacccgatgaaggacgttactaacgacgatatgctttggggagctgtaagtaagctttgatccagagatttccgaatggggaaacccagcatgagttatgtcatgttatcgatatgtgaatacatagcatatcagaaggcacacccggagaactgaaacatcttagtaaccggaggaagagaaagaaaattcgattcccttagtagcggcgagcgaaacgggaagagcccaaaccaactagcttgcttgttggggttgtaggacactctatacggagttacaaaggacgacattagacgaatcatctggaaagatgaatcaaagaaggtaataatcctgtagtcgaaaatgttgtctctcttgagtggatcctgagtacgacggagcacgtgaaattccgtcggaatctgggaggaccatctcctaaggctaaatactctctagtgaccgatagtgaaccagtaccgtgagggaaaggtgaaaagcaccccggaaggggagtgaaatagaacctgaaaccgtgtgcttacaagtagtcagagcccgttaatgggtgatggcgtgccttttgtagaatgaaccggcgagttacgatttgatgcaaggttaagcagtaaatgtggagccgtagcgaaagcgagtctgaatagggcgtttagtatttggtcgtagacccgaaaccaggtgatctacccttggtcaggttgaagttcaggtaacactgaatggaggaccgaaccgacttacgttgaaaagtgagcggatgaactgagggtagcggagaaattccaatcgaacctggagatagctggttctctccgaaatagctttagggctagcctcaagtgatgattattggaggtagagcactgtttggacgaggggcccctctcgggttaccgaattcagacaaactccgaatgccaattaatttaacttgggagtcagaacatgggtgataaggtccgtgttcgaaagggaaacagcccagaccaccagctaaggtcccaaaatatatgttaagtggaaaaggatgtggcgttgcccagacaactaggatgttggcttagaagcagccatcatttaaagagtgcgtaatagctcactagtcgagtgacactgcgccgaaaatgtaccggggctaaacatattaccgaagctgtggattgtcctttggacaatggtaggagagcgttctaagggcgttgaagcatgatcgtaagaacatgtggagcgcttagaagtgagaatgccggtgtgagtagcgaaagacgggtgagaatcccgtccaccgattgactaaggtttccagaggaaggctcgtccgctctgggttagtcgggtcctaagctgaggccgacaggcgtaggcgatggataacaggttgatattcctgtaccacctataatcgttttaatcgatggggggacgcagtaggataggcgaagcgtgcgattggattgcacgtctaagcagtaaggctgagtattaggcaaatccggtactcgttaaggctgagctgtgatggggagaagacattgtgtcttcgagtcgttgatttcacactgccgagaaaagcctctagatagaaaataggtgcccgtaccgcaaaccgacacaggtagtcaagatgagaattctaaggtgagcgagcgaactctcgttaaggaactcggcaaaatgaccccgtaacttcgggagaaggggtgctctttagggttaacgcccagaagagccgcagtgaataggcccaagcgactgtttatcaaaaacacaggtctctgctaaaccgtaaggtgatgtataggggctgacgcctgcccggtgctggaaggttaagaggagtggttagcttctgcgaagctacgaatcgaagccccagtaaacggcggccgtaactataacggtcctaaggtagcgaaattccttgtcgggtaagttccgacccgcacgaaaggcgtaacgatttgggcactgtctcaacgagagactcggtgaaatcatagtacctgtgaagatagcaggttacccgcgacaggacggaaagaccccgtggagctttactgtagcctgatattgaaattcggcacagcttgtacaggataggtaggagcctttgaaacgtgagcgctagcttacgtggaggcgctggtgggatactaccctagctgtgttggctttctaacccgcaccacttatcgtggtgggagacagtgtcaggcgggcagtttgactggggcggtcgcctcctaaaaggtaacggaggcgctcaaaggttccctcagaatggttggaaatcattcatagagtgtaaaggcataagggagcttgactgcgagacctacaagtcgagcagggtcgaaagacggacttagtgatccggtggttccgcatggaagggccatcgctcaacggataaaagctaccccggggataacaggcttatctcccccaagagttcacatcgacggggaggtttggcacctcgatgtcggctcatcgcatcctggggctgtagtcggtcccaagggttgggctgttcgcccattaaagcggtacgcgagctgggttcagaacgtcgtgagacagttcggtccctatccgtcgtgggcgtaggaaatttgagaggagctgtccttagtacgagaggaccgggatggacatacctctggtgtaccagttgtcgtgccaacggcatagctgagtagctatgtgtggacgggataagtgctgaaagcatctaagcatgaagcccccctcaagatgagatttcccaacttcggttataagatccctcaaagatgatgaggttaataggttcgaggtggaagcatggtgacatgtggagctgacgaatactaatcgatcgaagacttaatcaaaataaatgttttgcgaagcaaaatcacttttacttactatctagttttgaatgtataaattacattcatatgtctggtgactatagcaaggaggtcacacctgttcccatgccgaacacagaagttaagctccttagcgtcgatggtagtcgaacttacgttccgctagagtagaacgttgccaggcaaaaatggatgcgatgagccgcattgagaccgcaaggtctctttttttatgtctaaaacggcaaaataaaagttaacacaaagaaaaatggcttggcgaagtgaaaacgtttgaatctgacgaaacgagaaaagagcgcaacgagtttagtagagctaaatgagtaagcgagagctgaaggagaggaaagaagcaagcgattgtcacaagacaagaaaggttcttagcgatgatggtagctaacttacgttccgctagagtagaacgttgccaggcaaaaaatggatgcgatgagccgcattgagttttggaaatgataatttaataatgtgcacttttgattgtttaaatctgtgattagaagtataagtgaagacattcagaagtattataaaaagtgaacagcagtaagatagtttttaatcataaatcatcttactgctgtttttaggttttatgtctaatatcttttaaatcgaaatacaaaaaggaaattaattattatacaatagacaagctattgcataagtaacactaacttttatcaaagaagtgttactatataattaatacttttgaaagtaactaattccaaaacattgtaaataaaggaagcgtatatcatgaagcaacctattttaaataaattagaaagtttaaatcaagaagaagcgatttctttgcatgttccgggtcataaaaatatgactatcggtcatttatctcaattatcaatgacaatggataaaactgaaatacctggattagatgatctacatcatcctgaagaagtcattttggaaagtatgaagcaggtgaagaaacattcagattatgatggttatttcttagtgaatggcaccacttcgggaatattatctgtcatccagtctttttcacagaaaaaaggcgatatcttaatggcaagaaatgtacataaatctgtattacatgcgctcgatattagccaacaagaagggcattttattgaaacgcatcaaagtccgttaacgaatcattataataaagttaatttaagccgtttgaattatggcggtcacaaacttgctgtgttgacttatcctaactattacggtgaaacatttaatgtagaagaggttatcaaatctttgcaccaattaaatattcctgtactcattgatgaggcacacggcgcgcactttggattgcaaggatttccagattctacattaaattatcaagctgactatgttgttcaatcttttcataaaacgttaccagctttaacgatgggctcggtactttatattcataaaaatgcaccttatagagaaaatattatagaatatctaagctatttccaaacatctagtccttcatatttgattatggctagtttagagtcagctgcccagttctataaaacatatgatagtaccgtgttttttgataagagagcgcaattaatcgaatgtttggagaataaaggttttgaaatgcttcaagttgatgatccgttgaagctgttgataaaatatgaaggctttacaggtcatgatattcaaaattggtttatgaatgcacatatctatttagaattagctgacgactatcaagcattagcgatattgccgttatggcatcatgatgatacgtatttatttgattcgcttttacgtaaaattgaagatatgattttaccgaaaaaatcagtttctatagttaaacaaacacaacttttaacaactgaaggtaactataaaccaaaacgctttgaatatgttacttggtgtgatttgaaaaaggcaaaaggtaaagttctggcgcgacatattgtcccatatccgccagggattcctattattttcaaaggagaaacaataactgaaaatatgatagaattggtaaatgaatatctggaaactggaatgatagttgaaggaattaaaaataataaaattttagttgaggatgaataaaatgtcagcttttataacttttgagggcccagaaggctcaggtaaaacaactgtaattaatgaagtttatcatagattagtaaaagattatgatgtcattatgactagagaaccaggtggtgttcctactggtgaagaaatacgtaaaattgtattagaaggcaatgatatggacattagaactgaagcaatgttatttgctgcatctagaagagaacatcttgtattaaaggtcataccagctttaaaagaaggtaaggttgtgttgtgtgatcgctatatcgatagttcattagcttatcaaggttatgctagagggattggcgttgaagaagtaagagcattaaacgaattcgcaataaatggattatatccagacttgacgatttatttaaatgttagtgctgaagtaggccgcgaacgtattattaaaaatttaagagatcaaaatagattagatcaagaagatttaaagtttcacgaaaaagtaattgaaggttaccaagaaatcattcataatgaatcacaacggttcaaaagcgttaatgcagatcaacctcttgaaaatgttgttgaagacacgtatcaaactatcatcaaatatttagaaaagatatgatataattgttagaagaggtgttataaaatgaaaatgattatagcgatcgtacaagatcaagatagtcaggaacttgcagatcaacttgttaaaaataactttagagcaacaaaattggcaacaacaggtgggtttttaagagcaggtaatacaacattcttatgtggtgtcaatgatgaccgtgtagatgaaatattgtctgtgattaatcaaacgtgtggtaatagagaacagttggtttcacctattacacctatgggaggcagtgcggattcgtacattccatatccagttgaagttgaagttggcggtgctactgtatttgttatgccagttgatgcattccatcaattttaattctataatacaatcatcaattagagatacttaaaatagtgtattaataagttattaacaattttgggttgcttgactgcgactagttcagatgccaatagatttgatttttgtggttctaagaataatcacaaatcatggtcgctattgttgcagtaattagttgctctttggcaacctttttatataaaagcaaaagggagtttgtaatgaatggatgaacagcaacaattgacgaatgcatatcattcaaataaattatcgcatgcttatttatttgaaggtgatgatgcacaaacgatgaaacaagttgcgattaattttgcaaagcttattttatgtcaaacagatagtcaatgtgaaacaaaggttagtacatataatcatccagactttatgtatatatcaacaactgagaatgcaattaagaaagaacaagttgaacaacttgtgcgtcatatgaatcaacttcctatagaaagcacaaataaagtgtacatcattgaagactttgaaaagttaactgttcaaggggaaaacagtatcttgaaatttcttgaagaaccaccggacaatacgattgctattttattgtctacaaaacctgaacaaattttagacacaatccattcaaggtgtcagcatgtatatttcaagcctattgataaagaaaagtttataaatagattagttgaacaagacatgtctaagccagtagctgaaatgattagtacttatactacgcaaatagataatgcaatggctttaaatgaagaatttgatttattagcattaaggaaatcagttatacgttggtgtgaattgttgcttactaataagccaatggcacttataggtattattgatttattgaaacaggctaaaaataaaaaactgcaatctttaactattgcagctgtgaatggtttcttcgaagatatcatacatacaaaggtaaatgtagaggataaacaaatatatagtgatttaaaaaatgatattgatcaatatgcgcaaaagttgtcgtttaatcaattaattttgatgtttgatcaactgacggaagcacataagaaattgaatcaaaatgtaaatccaacgcttgtatttgaacaaatcgtaattaagggtgtgagttagatgccaaatgtaataggtgttcagtttcaaaaagcgggaaaattagaatattatacacctaatgatatacaagtagatatagatgactgggtagttgtcgaatctaaaagaggcatagagataggtattgttaaaaatccattaatggatattgctgaagaggatgttgtgttacctcttaaaaatattattcgcattgctgatgacaaagatattgataaatttaattgtaatgaacgagatgctgaaaatgcattaatactatgtaaagacattgtaagagaacaaggtttggacatgcgtttagtcaattgcgaatatacattagataaatcgaaagttatttttaattttacggcggatgatcgtattgattttagaaaattagtaaaaatattagcgcaacatttaaaaacacgtatcgagttgagacaaattggtgtaagggatgaagccaaattgcttggcggtatcggaccttgtggtaggtcgttatgttgttctacatttttaggagattttgaaccagtatcgattaagatggctaaggatcaaaatttatcattaaatccaactaaaatttccggtgcatgtggtcgtttgatgtgttgtttaaaatatgaaaatgactactatgaggaagtacgtgcgcaattacctgatattggtgaagcaattgaaacgcctgatggtaacgggaaagtagttgctttaaatatattagacatttctatgcaggtgaagcttgagggacatgaacagccacttgaatataaattagaagaaatagaaactatgcattaaggaggcattattacatttggatcgcaatgaaatatttgaaaaaataatgcgtttagaaatgaatgtcaatcaactttcaaaggaaacttcagaattaaaggcacttgcagttgaattagtagaagaaaatgtagcgcttcaacttgaaaatgataacttgaaaaaggtgttgggcaatgatgaaccaactactattgatactgcgaattcaaaaccagaaaaagctgtgaaaaagccattaccaagtaaagataatttggctatattgtatggagaaggatttcatatttgtaaaggcgaattatttggaaaacatcgacacggtgaagattgtctgttctgtttagaagttttaagtgattaatcaagcacactcaaatagtgttataattataaatgaatatggtttggataagtctgagacaatgcatgtttcaggctttaattgtgtataaagttttggtgattgcataagagatggcggtactaaatgttattattaagtgtgcgcgcagtatcattagttataaaatgtagctgttaaaagtcaaaaatacatcgaatgtagttaggcatataatataaaaagagatttcaattactcaatagaaaaaggttgtcttcataggagttaaaaatgttaaaagagaatgaacgatttgatcaactaatcaaagaagattttagtattattcaaaatgatgatgttttttcgttttcaacggatgctttgttgttagggcattttacaaaacctagaacaaaagatattgtgttggacttatgttcaggcaatggggtgatacccttattattgtttgcgaaacatccacgacatatagaaggtgttgagattcaaaaaacacttgtcgatatggcgcgacgcacatttcaattcaatgatgttgatgaatatttaacaatgcatcacatggatttgaaaaacgttactaaagtatttaaaccttcacaatatactttagtaacgtgtaatccgccttattttaaagagaatcagcaacaccaacatcaaaaagaagcacataagatagcgagacatgagattatgtgtacacttgaagattgcatgattgcagcccgtcatttattaaaagaaggtggcaggctaaatatggtacatcgtgcagatagactaatggatgtcttgtttgaaatgagaaaagtgaatattgaacctaagaaagtcgtctttatatatagtaaggtagggaaatcggcacaaacgatagttgtagaaggtcgaaaaggtggaaatcaaggtttagaaatcatgcccccattttatatttataatgaagatggtaattatagtgaagaaatgaaggaagtatattatggatagtcattttgtatatattgtaaaatgtagtgatggaagtttatatacaggatacgctaaagacgttaatgcacgtgttgaaaaacataaccgaggtcaaggagccaaatatacgaaagtaagacgtccggtgcatttagtttatcaagaaatgtatgagacaaagtctgaagcattgaagcgtgaatatgaaattaaaacttataccagacaaaagaaattgcgattaattaaggagcgatagtatggctgtattatatttagtgggcacaccaattggtaatttagcagatattacttatagagcagttgatgtattgaaacgtgttgatatgattgcttgtgaagacactagagtaactagtaagctgtgtaatcattatgatattccaactccattaaagtcatatcacgaacataacaaggataagcagactgcttttatcattgaacagttagaattaggtattgacgttgcgctcgtatctgatgctggattgcccttaattagtgatcctggatacgaattagtagtggcagccagagaagctaatattaaagtagagactgtgcctggacctaatgctgggctgacggctttgatggccagtggattaccttcatatgtatatacatttttaggatttttgccacgaaaagagaaagaaaaaagtgctgtattagagcaacgtatgcatgaaaatagcacattaattatatacgaatcaccacatcgtgtgacagatacattaaaaacaattgcaaagatagatgcaacacgacaagtatcactagggcgtgaattgactaagaagttcgaacaaattgtaactgatgatgtaacacaattacaagcattgattcagcaaggcgatgtaccattgaaaggcgaattcgttatcttgattgagggtgctaaagcgaacaatgagatatcgtggtttgatgatttatctatcaatgagcatgttgatcattatattcaaacttcacagatgaaaccaaaacaagctattaaaaaagttgctgaagaacgacaacttaaaacgaatgaagtatataatatttatcatcaaataagttaatcactttatcgattatatgaaattttaaacgattttataaacgtatgctgtaattttaaatggtaagttatcattttgtattgatactgataaaatgatgttgacttagataaaaaaatgatgacatcgacgttttttaatgtaaaataaatacattgaaagtaataaataccttaacattgaataagatgaaaatgagatgacgagataaatgttcgcgtccgttgaaatgcatagaaatcttagatattatttgaagtgagacattacgaggaggaacagttatggctaaagaaacattttatataacaaccccaatatactatcctagtgggaatttacatataggacatgcatattctacagtggctggagatgttattgcaagatataagagaatgcaaggatatgatgttcgttatttgactggaacggatgaacacggtcaaaaaattcaagaaaaagctcaaaaagctggtaagacggaaattgaatatttggatgagatgattgctggaattaaacaattgtgggctaagcttgaaatttcaaatgatgattttatcagaacgactgaagaacgtcataaacatgtcgttgagcaagtatttgaacgtttattaaagcaaggtgatatctatttaggtgaatatgaaggttggtattctgttccggatgaaacatactacacagagtcacaattagtagacccacaatacgaaaacggtaaaattattggtggtaaaagtccagattctggacatgaagttgaactagtaaaagaagaaagttatttctttaatattagtaaatatacagaccgtttattagagttctatgaccaaaatccagattttatacaaccaccatcaagaaaaaatgaaatgattaacaacttcattaaaccaggacttgctgatttggctgtttctcgtacatcatttaactggggtgtccatgttccgtctaatccaaaacatgttgtttatgtttggattgatgcgttagttaactatatttcagcattaggctatttatcagatgatgagtcactatttaacaaatactggccagcagatattcatttaatggctaaggaaattgtgcgattccactcaattatttggcctattttattgatggcattagacttaccgttacctaaaaaagtctttgcacatggttggattttgatgaaagatggaaaaatgagtaaatctaaaggtaatgtcgtagaccctaatattttaattgatcgctatggtttagatgccacacgttattatctaatgcgtgaattaccatttggttcagatggcgtatttacacctgaagcatttgttgagcgtacaaatttcgatctagcaaatgacttaggcaacttagtaaaccgtacgatttctatgattaataagtactttgatggcgaattaccagcgtatcaaggtccacttcatgaattagatgaagaaatggaagctatggctttagaaacagtgaaaagctatactgaaagcatggaaagcttgcaattttctgtggcattatctacggtatggaagtttattagtagaacgaataagtatattgacgaaacaacgccttgggtattagctaaggatgatagccaaaaagatatgttaggcaatgttatggctcacttagttgaaaatattcgttatgcagctgtattattacgtccattcttaacacatgcgccgaaagagatttttgaacaattgaacattaacaatcctcaatttatggaatttagtagtttagagcaatatggtgtgcttactgagtcaattatggttactgggcaacctaaacctattttcccaagattggatagcgaagcggaaattgcatatatcaaagaatcaatgcaaccgcctgctactgaagaggaaaaagaagagattcctagcaaacctcaaattgatattaaagactttgataaagttgaaattaaggcagcaacgattattgatgctgaacatgttaagaagtcagataagcttttaaaaattcaagtagacttagattctgaacaaagacaaattgtatcaggaattgccaaattctatacaccagatgatattattggtaaaaaagtagcagttgttactaacttgaaaccagctaaattaatgggacaaaaatctgaaggtatgatattatctgctgaaaaagatggtgtattaaccttagtaagtttaccaagtgcaattccgaatggtgcagtgattaaataactgtattttaaaaaaataggagagataattatgttgatcgatacacatgtccatttaaatgatgagcaatacgatgatgatttgagtgaagtgattacacgtgctagagaagcaggtgttgatcgtatgtttgtagttggttttaacaaatcgacaattgaacgcgcgatgaaattaatcgatgagtatgattttttatatggcattatcggttggcatccagttgacgcaattgattttacagaagaacacttggaatggattggatctttagctcagcacccaaaagtgattggtattggtgaaatgggattagattatcactgggataaatctcccgaagatgttcaaaaggaagtttttagaaagcaaattgctttagctaagcgtttgaagttaccaattatcattcataaccgtgaagcaacacaagactgtattgatatcttattggaggagcatgctgaagaggtaggcggaattatgcatagctttagtggttctccagaaattgcagatattgtaactaataagctgaatttttatatttcattaggtggacctgtgacatttaaaaatgctaaacagcctaaagaagttgctaagcatgtgtcaatggagcgattgcttgttgaaaccgatgcgccgtatctttcgccacatccgtatagagggaagcgaaatgaaccggcgagagtaactttagtagctgaacaaattgctgaattaaaaggcttatcttatgaagaagtgtgcgaacaaacaactaaaaatgcagagaaattgtttaatttaaattcataaagttaaaagtgagaaagatcgccgccataaatgtaaacgatgctatattcgtttaatatgctatggttctttctcacttttttaaattaaaatatcgtgcatgtgcaatacgtgcgatagagatggttagtgctttgaaattaagaattgtaggaaggcgttttaaatgaaaatcaatgagtttatagttgtagaaggacgagatgatactgagcgtgttaaacgagctgttgaatgtgatacgattgaaacgaatggtagtgccatcaacgaacaaactttagaagtaattagaaatgctcaacaaagtcgaggcgttattgtattaacagatccagattttccaggagataaaattagaagtacaattactgaacatgtcaaaggtgttaaacatgcgtatattgatagagaaaaagctaaaaataaaaaagggaaaattggtgttgaacatgccgacttaattgatattaaagaagcgttaatgcatgttagttcaccctttgacgaagcttatgaatcaattgataaatctgtgctaatagagttggggttaatcgttgggaaagatgcaaggcgccgtagagaaattttaagtagaaaattgcgaatcggccattccaatggtaagcagttattgaaaaagttaaatgcatttggttataccgaagcggatgtaaggcaagctttagaagatgaatgaggaagtggaaatgttggataataaagatattgcaacaccatcaagaacgcgagcgttgttagataaatatggctttaattttaaaaaaagtttaggacagaactttttaatagatgtgaatatcattaataatatcattgatgcaagtgatattgatgcacaaactggggtgattgaaattggtccaggtatggggtcgttgacagaacaattggccagacatgctaaaagagtattggcatttgaaattgatcaacgtttaatacctgtattaaatgatacactatcaccttatgataatgtgacggtgattaatgaagatattttaaaagcgaatattaaaaaagctgttgaaaatcatttacaagattgtgaaaaaataatggttgttgcaaacctgccgtactatattacgacgccaattttattaaatttaatgcaacaagatataccaattgatggctacgtggtgatgatgcaaaaagaagtgggtgaacgcttaaatgctgaagtaggttcaaaagcatatggttcattatcaattgtcgtacaatactatacagagactagtaaagtattaacggtacctaaatctgtatttatgccaccacctaatgttgattcaatagttgtaaaactgatgcagagaactgaaccgttagtaacagtagataacgaggaagcattctttaagttagcaaaagcagcatttgcacaaagaagaaagacaattaacaataactatcaaaattattttaaagatggtaaacaacacaaagaagtgattttacaatggttagaacaagcgggtattgatccaagacgtcgcggtgaaacgctatctattcaagattttgctaaattgtatgaagaaaagaaaaaattccctcaattagaaaattaaatgattgacaaagcaaagcactattgttaaaatttaaattttgtttgacgaaaacgctgcaaatatggtattatgtaacttgtagcgaggtggagcaatatgccaaaatcaattttggacatcaaaaattctattgattgtcatgtaggaaatcgtattgtactgaaagccaatggaggccgtaagaaaacaataaaacgttctggaattttaaaagaaacatatccgtcagttttcattgttgagttagatcaagacaaacacaactttgagagagtatcttatacatacactgatgtgttaactgaaaatgttcaagtttcatttgaagaggataatcatcacgaatcaattgcacactaaataagacatatagagatgttagacgtttcttagtataagaagtaaatattatgataattatttgagtgttgggcattatgttcaatactctttttatttacaaaatgtttaacactgatgtttcgcttatagatttttcagtaaatggataattgtatttataaacacaaatacaagtaaatactaagtaattagatggagaaaattacttttttattaaaaaaacactaaaaaacaaattaaaatgtcaaatattaattctctttatgttaaaatcatcatattaagataacgaaaagagggcggaaaatgatatatgaaacggcaccagccaaaattaattttacgctcgatacactttttaaaagaaatgatggctatcatgagattgaaatgataatgacaacagttgatttaaatgatcgtttaacttttcataaaagaaaagatcgaaagatagttgttgagattgaacataattatgtgccttctaatcataaaaatctcgcatatcgtgcagcgcaactatttattgagcaatatcaactaaagcaaggtgtaacaatttctatcgataaagaaatacctgtttctgctggcttagctggaggttcggctgatgcagcagcaacgttaagaggattgaatcgactttttaatataggggcgagtttggaagaattggctctactaggcagtaaaatcgggacagatattccgttttgtatttataataaaactgcactatgtactggaagaggagagaaaatcgagtttttaaataaaccaccttcagcttgggtgattcttgctaaaccaaacttaggcatatcatcaccagatatatttaagttgattaatttagataagcgttacgacgtacatacgaaaatgtgttatgaggccttagaaaatcgagattatcaacaattatgtcaaagtttgtctaatcgattagagccaatttctgtttcaaaacacccacaaatcgataaattaaaaaataatatgttgaaaagtggtgcagatggtgcgttaatgagtggaagcggaccgactgtgtatgggctagcacgaaaagaaagccaagcaaaaaatatttataatgcagttaacggttgttgtaatgaagtgtacttagttagactattaggatagaagggttgaaaagatgagatataaacgaagcgagagaattgtttttatgacgcaatatttgatgaaccatccgaataaattgattccattaactttttttgtgaaaaaatttaaacaggcgaagtcttcaataagtgaagatgtccaaattataaaaaatacattccaaaaagaaaagttaggtacagtaattactactgctggcgcaagtggtggtgttacgtataaaccaatgatgagtaaagaagaggcgactgaagttgttaatgaggtcattactctattagaagagaaagaacgtttgttacctggcgggtatttatttttatcagatttggtaggtaatccatcgctactaaacaaagttggtaagttaattgccagtatttacatggaagaaaaattagatgctgttgttaccattgcgacaaaaggtatttcattggcaaatgcggttgctaatattttaaatttaccagtagtagtgattagaaaagacaacaaggtgactgaaggttctacagtttcaattaattacgtttcaggatcttcaagaaaaatagagacaatggtactttcgaagagaactttagcagaaaattcaaatgttttagttgtcgatgattttatgagggctggtggctctattaatggtgttatgaatttaatgaatgagtttaaagcccatgtaaaaggggtatcagtacttgtagaatcaaaagaagttaaacaaagattgattgaagattatacttccttagtgaaattatctgatgtagatgaatataatcaagagtttaacgtagaacctggcaacagtttatctaagttttcataaaaggagttttagtattatgaaaatcattaacacaacaagattaccggaagcacttggaccatattcgcatgcaacagttgtaaatggtatggtttatacttctggtcagattccattgaatgttgatgggaaaatcgtaagcgctgatgttcaagcacagacaaaacaagttttagaaaatttaaaggttgttttggaagaagcaggatctgatttgaattctgttgcgaaagcgaccattttcattaaatatatgaatgatttccaaaagataaatgaagtgtatggtcaatattttaatgaacacaagccagcgcgtagttgtgtagaggttgcgcgtttgccaaaagatgtgaaagtagaaattgaattagtaagtaaaattaaggaattataattttcgattaatatgtttaatcaagcttctaaataaaacagagagatatatactataggggggctcactacatgaaagtgacagatgtaagacttagaaaaatacaaacagatggacgaatgaaagcactcgtttccattacattagatgaagctttcgtaattcatgatttacgtgtaattgaaggaaactctggcttgttcgttgcaatgccaagtaaacgtacaccagatggtgaattccgcgacatcgcgcatcctattaattcagatatgagacaagaaattcaagatgcagtgatgaaagtatatgatgaaacagatgaagtagtaccagataaaaacgctacatcagaagattcagaagaagcttaatcaattttatatttagcgatgtaatacatttgcaataagttgatttgatactgtcgataaagcataaagctttgtcggcagttttttttatcgaaaagaaaaaccatacgctatgcgtatcggttcagaaaaaggttctaccattcgtcacaaaaaatcgcattctctacgtgctagaataaatattggtcagccaaccaaaataatcaacacgaggagaagctatttaatgtcatctgacacaaacagtttagcacatacaaaatggaattgtaagtatcatattgtcttttgcacctaaatacagaagaacaagtgatatatggaaaaaataaaaaaagatatagggattatatttgcgtcaattatgtgaaaagaaaaggtgtagagataattgaagcagaagcatgtaaagatcatatccatatgttagtaagtataccacctaaacttggggtatcatcatttgttggctatttaaaaggaaaaagtagtttaatgatatttgatagacattgctaacttaaagtatagatatggatatagaaagttttggtgtaaaggattttatgtggatacagtaggtagaaataaaaaagtgattgaaaatcatattcgtaatcaaattacagaggatatcgttgcagaccaaatctacatggaagaatatttagatcctttcactggagagataaatagaaaagaaagaaaaaagagtaccctttagggttgctgaaatagtagtgcagttggctgacttgtcagtgcccttttagggctggccagtaaggaaggcttatagccgcagaacaaaccacccgttcacacgggtggttttgattagtttgtattaatgtttttttatgaaatgaaaggctaataaatatatacgttaacagattatgatgatatgaagattattgatttattgctgataaaaattacgtttgaatgatgctcgtatttttgaagtaagaaaaagttgtttttaaaattacaacgaattaaaaacaatgccttttatatgttgaaagagtattgcagattaaattataataatgacgaagtgtaaaatttaatgggggttaatgttcatgcgaagacacgcgataattttggcagcaggtaaaggcacaagaatgaaatctaaaaagtataaagtgctacacgaggttgctgggaaacctatggtcgaacatgtattggaaagtgtgaaaggctctggtgtcgatcaagttgtaaccatcgtaggacatggtgctgaaagtgtaaaaggacatttaggcgagcgttctttatacagttttcaagaggaacaactcggtactgcgcatgcagtgcaaatggcgaaatcacacttagaagacaaggaaggtacgacgatcgttgtatgtggtgatacaccgctcatcacaaaggaaacattagaaacattgattgcgcatcacgaggatgctaatgctcaagcaactgtattatctgcatcgattcaacaaccatatggatacggaagaatcgttcgaaatgcgtcaggtcgtttagaacgcatagttgaagagaaagatgcaacgcaagctgaaaaggatattaatgaaattagttcaggtatttttgcgtttaataataaaacgttgtttgaaaaattaacacaagtgaaaaatgataatgcgcaaggtgaatattacctccctgatgtattgtcgttaattttaaatgatggcggcatcgtagaagtctatcgtaccaatgatgttgaagaaatcatgggtgtaaatgatcgtgtaatgcttagtcaggctgagaaggcgatgcaacgtcgtacgaatcattatcacatgttaaatggtgtgacaatcatcgatcctgacagcacttttattggttcagacgttacaattggtagtgatacagtcattgaaccaggcgtacgaattaacggtcgtacaaaaattggtgaagatgttgttattggtcagtactctgaaattaacaatagtacgattgaaaatggtgcatgtattcaacagtctgttgttaatgatgctagcgtaggagcgaatactaaggtcggaccgtttgcgcaattgagaccaggcgcgcaattaggttcagatgttaaggttggaaattttgtagaaattaaaaaagcagatcttaaagatggtgccaaggtttcacatttaagttatattggcgatgctgtaattggcgaacgtactaatattggttgcggaacgattacagttaactatgatggtgaaaataaatttaaaactatcgtcggcaaagattcatttgtaggttgcaatgttaatttagtagcacctgtaacaattggtgatgatgtattggtggcagctggttccacaatcacagatgacgtaccaaatgacagtttagctgtggcaagagcaagacaaacaacaaaagaaggatataggaaataatcatttacgtatttaaaatggctaggataaaaggataatcctatgtaatattaatgtaatctttatgatttaatgattcgcatagtaatggagttacattttatatataatagtaattgcgtaagtaaataattggaggactataaatgttaaataatgaatataagaattcgtcattaaagattttttcattgaaaggaaacgaagcattagcgcaagaagttgctgaccaagtaggaattgaactaggtaaatgttcagttaaacgttttagtgatggagaaattcaaattaatatcgaagagagtattcgtggttgtgacgtatttattattcaaccaacatcatatcctgtaaatctacatttaatggaattattaattatgattgatgcttgtaaacgtgcttctgcagcaacaatcaatattgtagtgccatattatggatatgcaagacaagatagaaaagcccgtagccgtgagccaatcactgctaaattagttgcaaacttaatcgaaacagctggcgcaactcgtatgattgcgttagacttacatgcaccacaaattcaaggattctttgatattccaattgaccacttaatgggtgtgccaattcttgctaaacatttcaaagatgatccgaatattaacccagaagaatgtgtcgttgtttcaccagaccatggcggtgttacacgtgcacgtaaattagctgacattttaaaaactccaattgcaattatagataaacgtcgccctagaccaaatgttgctgaagtgatgaacattgttggtgagattgaaggacgtacggcaattattattgacgatattattgatacagcaggtacaatcactttagctgcacaagcattaaaagataaaggtgctaaagaagtatatgcttgttgtacacaccctgttttatcaggaccggctaaagaacgtatcgaaaattctgctataaaagaattaatcgtaacaaactcaattcatttagatgaagatcgcaaaccatctaacactaaagaattatctgttgctggtttaatcgcacaagctatcattcgtgtatacgaaagagaatcagttagcgtattatttgactaatatttaaaaggtgtttgacgaacatattccaaacgtgtataatagtttcgttcgtgattatacgaataaataaacacttgcaagcaacgattatgttgatgggtaagtgaggtgctcgttttgagcaaaaatgaaaggtggaaatgagaatggcttcattaaagtcaatcatccgtcaaggtaaacaaacacgttcagatcttaaacaattaagaaaatctggtaaagtaccagcagtagtatacggttacggtactaaaaacgtgtcagttaaagttgatgaagtagaattcatcaaagttatccgtgaagtaggtcgtaacggtgttatcgaattaggcgttggttctaaaactatcaaagttatggttgcagactaccaattcgatccacttaaaaaccaaattactcacattgacttcttagcaatcaatatgagtgaagaacgtactgttgaagtaccagttcaattagttggtgaagcagtaggcgctaaagaaggcggcgtagttgaacaaccattattcaacttagaagtaactgctactccagacaatattccagaagcaatcgaagtagacattactgaattaaacattaacgacagcttaactgttgctgatgttaaagtaactggcgacttcaaaatcgaaaacgattcagctgaatcagtagtaacagtagttgctccaactgaagaagaaatcgaagctatggaaggcgaacaacaaactgaagaaccagaagttgttggcgaaagcaaagaagacgaagaaaaaactgaagagtaagtttaactgattaccataaagtttttatactttgttaaacaagcactgtgcttattttaatataagcatggtgctttttgtgttattataaagcttaattaaactttattgctttgtactaaagttaaattaattttagtgagtaaaagacattaaactcaacaatgatacatcataaaaattttaatgtacttgattttaaaatacatacttactaagctaaagaataatgataattgatggcaatagcggaaaatagatgttgtcattataataataaatgaaataattatgttggaggtaaacacgcatgaaatgtattgtaggtctaggtaatataggtaaacgttttgaacttacaagacataatatcggctttgaagtcgttgattatattttagagaaaaataatttttcattagataaacaaaagtttaaaggtgcatatacaattgaacgaatgaacggagataaagtgttatttatcgaaccaatgacaatgatgaatttgtcaggtgaagcagttgcaccgattatggattattacgatgttaatccagaagatttaattgtcttatatgatgatttagatttagaacaaggacaagttcgcttaagacaaaaaggaagtgcgggcggtcacaatggtatgaaatcaattattaaaatgcttggtacagaccaatttaaacgtattcgtattggtgtgggaagaccaacgaatggtatgacggtacctgattatgttttacaacgcttttcaaatgatgaaatggtaacgatggaaaaagttatcgaacacgcagcacgcgcaattgaaaagtttgttgaaacatcacgatttgaccatgttatgaatgaatttaatggtgaagtgaaataatgacaatattgacaacgcttataaaagaagataatcattttcaagaccttaatcaggtatttggacaagcaaacacactagtaactggtctttccccgtcagctaaagtgacgatgattgctgaaaaatatgcacaaagtaatcaacagttattattaattaccaataatttataccaagcagataaattagaaacagatttacttcaatttatagatgctgaagacttgtataagtatcctgtgcaagatattatgaccgaagagttttcaacacaaagccctcaactgatgagtgaacgtattagaactttaactgcgttagctcaaggtaagaaagggttatttatcgttcctttaaatggtttgaaaaagtggttaactcctgttgaaatgtggcaaaatcaccaaatgacattgcgtgttggtgaggatatcgatgtggaccaatttcttaacaaattagttaatatggggtacaagcgtgaatctgtggtatcgcatattggtgaattctcattgcgaggaggtattatcgatatctttccgctaattggggaaccaatcagaattgagctatttgataccgaaattgattctattcgggattttgatgttgaaacgcagcgttcaaaagataatattgaagaagtcgatataacaactgcaagtgattatatcattactgaagaagtgattagacatcttaaagaagagttaaaaactgcatatgaaaatacaagacccaaaatagataaatcagtgcgcaatgatctgaaagaaacgtatgaaagctttaaattattcgaaagtacatactttgatcatcaaatactacgtcgtttagtagcatttatgtatgaaacaccttcgacaattattgattatttccaaaaagatgcaatcattgcggttgatgaatttaatcgtattaaagaaactgaagaaagtttaacagtagagtctgattcgtttattagcaatattattgaaagtggtaatggatttataggacaaagttttataaaatatgatgattttgaaacattgattgaaggctatcctgtcacttatttttcattattcgctacaacaatgccgataaaactaaatcatattattaaattttcatgtaaacctgtccaacaattttatgggcaatatgatattatgcgttctgaatttcaacgatatgttaatcaaaactatcatatcgtggttttggtcgaaaccgaaactaaagttgaacgtatgcaagcgatgttaagtgaaatgcatattccatcaataacaaaattgcatagttcaatgtcatcggggcaagcagtgattattgaaggcagtttatctgaaggatttgaactacctgatatgggattagttgtcattactgaacgtgagctttttaaatcaaaacagaaaaagcaacgaaaacgtacgaaagctatctcaaatgctgaaaaaattaagtcttaccaagatttaaatgtgggagattatattgttcatgtgcatcatggtgttggtagatatttaggtgttgagacgctcgaagtggggcaaacgcatcgtgattatattaaattgcaatataaaggtacggatcaactatttgttccagtagatcaaatggatcaagttcaaaaatatgtagcttcggaagataagacgccaaaattaaataaactcggtggcagtgaatggaaaaaaacaaaagctaaagttcaacaaagtgttgaagatattgctgaagagttgattgatttatataaagaaagagaaatggcagaaggttatcaatatggggaagacacagctgagcaaacaacatttgaattagattttccatatgaacttacgcctgaccaagctaaatctatcgatgaaattaaagatgacatgcaaaaatcgcgtccaatggatcgcttgctatgtggtgatgttggttatggtaaaaccgaagttgcagtgagagcagcattcaaagctgtaatggaaggaaagcaggttgcatttttagttcctacaactattttagctcagcaacattatgagacgttaattgagcgtatgcaggattttcctgttgaaattcaattaatgagtcgttttagaacgcctaaagagataaaacaaactaaggaaggacttaaaactgggtttgttgacatagttgttggtacacacaaattacttagtaaagatatacagtataaagatttagggctattgattgtagatgaagaacaacgatttggtgtacgccataaagagcgtattaaaacattaaaacataatgtagatgtactaactttgactgcaaccccaatacctagaacattgcatatgagtatgctaggtgtgcgcgatttgtcagtgattgaaacgccgccagaaaatcgtttcccagttcaaacatatgtattagaacagaacatgagttttatcaaagaagctttagaaagagaactatcccgtgatggccaagtattttatctttataataaagtgcaatccatttatgaaaaacgagaacaactccagatgttaatgccagatgctaatattgcagttgctcacggacaaatgacagagcgtgatttagaagaaacgatgttaagttttatcaataatgaatatgatattttagtaacgacgacgattattgaaacaggtgtcgatgtcccaaatgcaaatactttgatcattgaagatgcagatcgctttggattgagtcagttgtatcaattaagaggtcgtgttggtcgttcaagtcgtattggttatgcatacttcttacatccagcaaataaggtactaactgagactgcagaagatcgattacaagcgattaaagaatttacggagttaggctcaggatttaagattgcgatgcgtgatttgaacattcgtggtgctggtaatttgttaggtaaacaacagcacggctttattgatacagttggatttgatttgtacagtcaaatgttagaagaagctgtaaatgaaaaacgtggtattaaggaaccagaatctgaggtgccagaagtcgaagttgatttaaacttggatgcatatttgccaacagaatatattgcaaatgaacaagctaaaattgaaatctataaaaagctacgaaaaactgaaacatttgatcaaattatcgacattaaagatgaattaattgatcgtttcaatgattatcctgttgaagtagcacgtttgcttgatatagtggaaataaaagtacacgcattacattcaggtatcacgttgattaaagataaagggaaaataattgatattcatttatctgtaaaagccactgaaaatattgatggcgaagtgcttttcaaagcaacacaacctttaggtagaacaatgaaggttggtgttcaaaataatgcaatgacaattactttaacaaaacaaaatcaatggcttgatagtttgaagttcttagttaagtgcattgaagaaagtatgagaatcagtgatgaaacataaagaagcatttaatggcgttgtcgtgttaactgctgcattaattgtcattaaaattctgagtgctgtatatcgaattccatatcaaaatatattaggcgatacaggtttgtatgcatatcaacaagtgtatccaattgtagcattaggaatgatattatcgatgaatgccattcctagtgcaattatacaaaatatagggaagtatcatagtgacgaagcatatgcaaaagcagtcgcttatatacaattagttggtatattattatttattgctatttttgtgtttgcgaacaatattgcatatatgatgggtgatagccatttaacacctatgattcaagctgcaagtttaagctttatatttataggtatgcttggcgtgttaagaggttattatcaatctgcaaataatatgacagttccggctatttcccaggttatagaacaagttatacgagtaggtattatcattgttactattgttatttttgtagatagaggttggacgatatatgaagcgggaagaattgctattttagcatcaacgataggttttttaggttcttcaatttatttagtagcgcaccgaccttttaagtttaaaatggtaaataacactgcaaagatcgtttggaaacagttcgcactttcggttttgattttcgctatcagtcaattaatcgtaattttatggcaagtgattgatagtgttactattattaagtcacttcaagcgatacgcgtgccattcgatgttgccataactgaaaaaggagtctatgaccgtggtgcatcatttattcagatgggattgattgtaactacaacatttagttttgcgctcattcctctgttaagtgacgcaatcaaaatgaataatcaggtacttatgaatcgttatgcaaatgcgtcattaaagattacgattttaataagtacagcagcgggaataggattaattaatttattgcctttaatgaacggtgtattttttaagacgaatgatttaaccttaacattaagcgtttatatgattacggtcatttgtgtatcgttaattatgatggatatggcattattacaagctcaacatgctgtgagacctatttttgttggtatgacggcaggattggttattaaatttatacttaatatcattttgattcggttaagtggcattattggtgcgagcattagtactgttgtatcattaattatattcggtacgattatccatattgctgtcacgagaaaataccacttacatgcgatgagacgattttttatcaatgttgttttaggtatggtatttatgtcgattgttgttcaatgcgtgttaaacatagtgacaacacacggtagaatcactggactcattgaattattatgtgcagcagtattaggtatcattgcattgtttttctatatttttagatttaatgttttgacatataaagagttaacttatttaccatttggttcaaagttgtatcaaattaagaaaggaagacgttgatggcacataccattacgattgttggcttaggaaactatggcattgatgatttgccgctagggatatataaatttttaaagacacaagataaagtttatgcaagaacgttagatcatccagttatagaatcattgcaagatgaattaacatttcagagttttgaccatgtttatgaagcacatgaccaatttgaagatgtctataatgatattgtggcgcaattggttgaagctgctaatgaaaaagatattgtctatgcggttccgggtcatcctagagttgctgagacaactacagtgaaattactggctttagcaaaagacaatactgatatagatgtgaaagttttaggtgggaaaagctttattgatgatgtttttgaagcagttaatgtagatccaaatgatggcttcacactgttagatgcgacatcattacaagaagtaacacttaatgttagaacgcatacattgattacgcaagtttatagtgcaatggttgctgctaatttgaaaatcactttaatggaacgatatcctgatgattaccctgttcaaattgtcactggtgcacgaagcgatggtgcggataacgttgtgacatgcccattatatgaattggatcatgatgaaaatgcattcaataatttgacgagtgtattcgtaccaaaaatcacaacaccgacatatttgtatcatgactttgattttgcaacggaagtgattgatactttagttgatgaagataagggttgtccatgggataaagtgcaaacgcatgaaacgcttaaacgttatttacttgaagaaacatttgaattgttcgaagctattgacaatgaagatgattggcatatgattgaagaactaggagatattttattacaagtgttattgcatactagtattggtaaaaaagaagggtatatcgacattaaagaagtgattacaagtcttaatgctaaaatgattcgtagacacccacacatatttggtgatgccaatgctgaaactatcgatgacttaaaagaaatttggtctaaggcgaaagatgctgaaggtaaacagccaagagttaaatttgaaaaagtatttgcagagcattttttaaatttatatgagaagacgaaggataagtcatttgatgaggccgcgttaaagcagtggctagaaaaaggggagagtaatacatgagattagataaatatttaaaagtatcacggttaataaagcgacgtacgctagcaaaagaagtaagtgatcaaggtagaattacaataaatggtaatgttgctaaagctggatcggatgttaaagttgaagatgtgctgacgattcgctttggtcaaaaattagtaacagttaaagtaactgcattaaatgaacatgcatctaaagataacgcgaagggcatgtatgaaatcattgaagagcgtcgacttgaagaagcgtaaattggaggtgacaagcaatgaaaaataaagtagaacatatagaaaatcagtacacgtcgcaagagaacaagaaaaaacaacgtcaaaaaatgaaaatgcgtgttgttcgtaggcgtattacagtatttgcgggcgtattacttgcgataattgttgttttatcaatcttgcttgttgtccaaaaacatcgcaatgatattgatgcacaggagcgaaaagcgaaagaagcacagtttcaaaagcaacaaaatgaagaaattgcgttaaaagaaaagttgaataatctgaatgacaaagattatattgaaaaaattgcgcgtgatgattattacttaagcaacaaaggtgaagtgatttttaggttgccagaagacaaagattcgtctagctcaaaatcttcgaaaaaataaatccaaattgattcaaaattatccgagtatagacattgtgaaaaaatccaaacaaggatataataagggaaaatcgaatcaaatcgggaggatttatttaacatatgtcaatcgaagttggaaataagcttaaaggtaaagtcactggtattaaaaagtttggtgcattcgtagaattacctgaaggaaaaagtggtttagttcacattagtgaagtcgcagataattatgttgaaaacgtagaagagcacctttctgttggtgatgaagtagacgtaaaagtattatctattgctgatgatggaaaaattagtctttcaattaagaaagctaaagaccgtccacgtagacaacatacgagtaaaccaagtcatcaaaaaccagtgcaaaaagccgaagattttgaaaagaaattaagcaatttcttaaaagatagtgaagataaattaacttcaatcaaacgtcaaacagaatctagacgcggtggcaaaggttctagacgttaattaaaataaataaagactgtttcgataaggaatatatttagaatgatgcgtatcgaataatcgattgcagcgttagacaatctaagactgtttcttaaataaggagcagtctcttttatttgtaatgatataactaagacttataccatttttgaaaattgtaaaagtgaggtgatgttatgcagttaaatagtaatggttggcatgttgatgaccatattgttgtcgctgtttctacaggtattgatagtatgtgtttattgtatcaactactaaatgattataaagatagttacagaaaactaacatgtttacatgtcaatcatggcgtcaggtcagcttcaatcgaggaagccagatttttagaagcatactgcgaacgtcatcacatcgatttacatatcaaaaagttggatttgtcgcatagtctcgaccgaaataacagcattcagaatgaagctcgaattaaacgttacgaatggtttgatgaaatgatgaatgtattagaagcggatgtattgctaacggcgcatcatttggacgatcaattagaaactattatgtatcgcatttttaatgggaaatcaacgcgtaataaactaggatttgatgagttatcgaagcgaaaaggttatcagatttatcgaccacttctagctgtctctaaaaaagaaataaaacaattccaagagagatatcatataccatattttgaagatgaatctaataaagataacaaatatgttagaaatgatattcgtaatagaattattccagctattgatgaaaataatcaacttaaagtatcgcatttattaaaattaaaacaatggcatgatgaacaatatgatattttgcaatattcagctaaacaatttattcaagaatttgtgaagtttgatgaacagtcaaaatatttagaggtttctagacaagcttttaataacttgccaaactcattaaagatggttgtgttggattgcctattatcaaagtattatgagttgtttaatattagtgctaaaacatacgaagagtggtttaaacaatttagtagtaagaaagcacaattcagtattaatctcacggataaatggataattcaaatcgcatatggtaaattaataataatggctaaaaataatggcgatacatattttagagttcaaactattgaaaagccaggtaattatatttttaacaaatatcgattagagatacattctaatttaccaaaatgtttatttccgcttacagtgagaacacgacaaagtggcgatgcatttaaactaaatgggcgcgatggttataagaaagtgaatcgcctgtttatagattgtaaagtgcaacagtgggttcgggatcaaatgccaatcatattggataaacaacagcgcattattgcggtaggagatttatatcaacaacaaacaataaaacaatggattttaattagtaaaaatggagatgaatagcgttatgcataatgatttgaaagaagtattgttaactgaagaagatattcaaaatatctgtaaggaattgggagcacaattaacaaaggattatcaaggtaaaccattagtatgcgtgggtatcttaaaaggctcagcaatgtttatgtcagatttaattaaacgaattgatacccatttatcaattgatttcatggatgtttctagttatcacggaggcactgagtcaactggtgaagttcaaatcattaaagatttaggttcttctattgaaaataaagacgtattaattattgaagatatcttagagactggtactacacttaagtcaattactgaattattacaatctagaaaagttaattcattagaaatagttactttattagataaaccaaaccgtcgtaaagcggacattgaagctaagtatgtaggtaaaaaaataccagatgaatttgttgttggttacggtttagattatcgtgaattataccgaaacttaccatatatcggcacgttaaaacccgaagtgtattcaaattaattttttaatcgatttcagttattattactatgcgtttgagaaataatagtgtagactcaaaaatatgaaaaatgtatttcatatatatttaattttaggcaagacatatgtcttaaaaagttgaaaaatatagagattgataaaactaacacagggtgtgaatgacattgatgttaagctcaattactagcttataaaacatgtcatatgttacaatttttgttagttttattatgggaagtaggaggaaatgacgcatgcagaaagcttttcgcaatgtgctagttatcgtaataataggcgttattatttttggtctattttcatatttaaacggtaatggaaatatgccgaaacagcttacatataatcaatttactgagaagttggaaaaaggtgaccttaaaactttagaaatccaaccacaacaaaatgtctatatggtaagtggtaaaacgaaaaatgatgaagactattcatcaactattttatataacaacgaaaaagaattacaaaaaattactgatgctgctaaaaagcaaaacggtgtaaaattaacgattaaagaagaagaaaaacaaagtgtctttgtgagtatactttcaacattaattccagttgtagtcatagcgttattatttattttcttcctaagccaagcacaaggtggcggtagtggcggtcgtatgatgaactttggtaaatctaaagcaaaaatgtacgataataataaacgtcgtgttcgtttctctgatgtagcaggggcagatgaagaaaaacaagaattaattgaaattgttgatttcttgaaagataataaaaaattcaaagaaatgggatctaggattcctaaaggtgtcttacttgttggacctccaggtactggtaaaacattacttgctagagcggttgcaggtgaagcaggcgcaccattcttctctattagtggttcagactttgtagagatgtttgttggtgttggtgcgagccgtgttcgtgacttattcgataatgctaagaaaaacgcgccttgtatcatctttatcgatgagattgatgctgttggtcgtcaacgtggtgcaggtgttggtggcggtcatgatgaacgtgaacaaaccctaaaccaattattagttgaaatggatggattcggtgaaaatgaaggtatcattatgatagctgctacaaaccgtcctgatatccttgacccagccttattacgtccaggtcgttttgatagacaaattcaagttggtcgtccagatgtgaaaggccgtgaagcaattcttcatgttcatgctaaaaataaaccgcttgatgaaacggttgatttaaaagcaatttcacaacgtacacctggtttctcaggtgctgatttagagaacttattaaatgaagcatctttaattgctgtacgtgaaggtaaaaagaaaattgacatgagagatatcgaagaggcaacggatagagttatagccggacctgctaagaaatctcgagttatttctaagaaagaacgtaatattgttgctcatcacgaagctggtcatacaattatcggtatggtacttgatgaggcagaagtagtgcataaagttactattgttccacgtggacaagcaggtggttatgcaatgatgctacctaaacaagatcgtttcttaatgactgaacaagagttattagataaaatctgtggtttacttggtggacgtgtatcagaagatattaactttaacgaagtatcaacaggtgcttcaaatgacttcgaacgtgcaacacaaatcgcacgctcaatggttacacaatatggtatgagtaaaaaattaggaccattacagttcggtcatagcaatggtcaagtattcttaggtaaagatatgcaaggtgagcctaattattcaagccaaatcgcatatgaaattgataaagaagttcaacgaatcgttaaagaacaatacgaacgttgtaaacaaattttattagagcacaaagaacagttaattttaattgctgaaacattattaacagaagaaacattagttgctgaacaaattcaatcattattctacgaaggtaaattacctgaaattgattatgatgcagctaaagttgttaaagatgaagattctgaatttaatgatggtaaattcggtaaatcttatgaagagattcgtaaagagcaattagaagatggacaacgtgacgaaagtgaagatcgtaaagaagaaaaagatattgctgaggataaaaaagaagctgataaatctgatgaaaaagatgaaccagcacatcgacaagccccaaatatcgaaaaaccttacgatccaaatcacccagacaataaataatcgattatattcagtacctctttctatgataaagttatagaaagaggtactttttagcattttaaataattagaaagttgtttatcagttttatagtaagcgataaaatcgttgtacgatgaattaactatcaaacaagttgcttcattatttagaatgatgggtgtagaataagtacaattgttgcattttatgaagtaaagtaatttttaaaatatagagtaatagaggagattgaaataatgacacacgattatattgttaaagcattagcatttgatggggagattagggcttatgctgctttgacaactgaaactgttcaagaagcacaaacgagacattatacatggccgacagcatctgctgcaatgggaagaacaatgacagcaacagctatgatgggcgcaatgttgaaaggtgatcaaaaattaactgtcactgtagatggccaaggacctattggacgaattattgccgatgcaaatgctaaaggcgaggtgcgtgcttatgtagaccatccacaaactcattttccattaaatgagcaaggtaaacttgatgtaagacgagcagtagggacaaatggatctattatggttgttaaagatgttggaatgaaagactatttctctggagcaagtccaattgtttcaggagaacttggtgaagattttacttattattatgctacaagtgaacaaacaccttcatcggtaggtcttggtgtattggtaaatcctgataatacgattaaagcagcaggaggatttatcattcaagttatgccaggtgccaaagatgaaacaatttcaaaattagaaaaagcaattagtgaaatgacaccagtttctaaattaattgaacaaggattaacgccagaaggattactaaacgaaatcttaggtgaagaccatgtgcaaattttagagaaaatgcctgttcaatttgaatgtaattgtagtcatgagaaatttttaaatgctattaaaggattgggcgaggctgagattcaaaatatgattaaagaagatcatggtgctgaagcagtatgtcatttctgtggaaataaatataaatatactgaagaagaattaaacgtgttgctagaaagtttagcgtaatttaatttaaatcaatacgctaaaatgtttatttttagcggtttagtgaaatgtagaactaaatagttgtataatccttagtgattttgtttgctttctagaatttatttgataaaataattctatatccgataaataaactaagatttcaacaactaactaaaaaggagtgttcttaatggcacaaaaaccagtagataatattactcaaattattggcggtacaccggtagtcaaattgagaaatgtagtagatgacaatgcagcagatgtttatgtaaaattggaatatcaaaatccaggtggttctgtaaaagatagaattgctttagcaatgattgaaaaagcagagcgagaaggcaaaattaaacctggcgatacaattgtagaaccaacaagtggtaatacaggtatcggtttagcatttgtatgtgctgctaaaggatataaagcagtatttactatgcccgaaacaatgagccaagagcgtcgtaatttattaaaagcatacggtgcggaattagttttaacgcctggatcagaagcgatgaaaggtgcaattaaaaaagctaaagaattaaaagaagaacatggttactttgagccacaacaatttgaaaaccctgcgaaccctgaagttcatgagttaactacaggtcctgagttattacaacaatttgaagggaaaactatcgatgcgttcctagctggtgttggtactggtggtacgttatctggtgtaggtaaagttctgaaaaaagaatatcctaacatcgaaattgttgctatagagcctgaggcttctccagtattgagcggtggtgagccaggtccacataaattacaaggtttaggtgctggatttattccaggtactttgaatacagaaatctatgacagtattattaaagtaggaaatgatacagcgatggaaatgtctcgtcgagttgctaaagaggaaggtattttagcaggtatttcatcaggtgctgcgatttatgctgccattcaaaaagcaaaagaattaggaaaaggtaaaacagtagtaacagtattgccaagtaatggtgagcgctacttatcaacacctttatattcattcgatgactaattaatgtcatttaaaagagtgagttatctttttgagataacttgctctttttttctaccatgtataattttaaaaatatgagcgttaaattaaacatttttctgataaaaacatccagtgaatgataagataataaacgtacatactaataactagtaaatcgcagaagtaaattttattagagttaaacaatacataattaaaggatggttaacatgactaaaacaaaaattatgggcatattaaacgtcacacctgattcattctcagatggtggaaaatttaataatgttgaatcagcagtaactagagtgaaagcgatgatggatgaaggtgctgacattatagatgttggaggtgtttcaacgagacccggccatgaaatggtttcattagaagaagagctgaacagagtattacctgttgttgaggctattgtcggttttgatgtgaaaatttcagtcgatacatttcgaagtgaggttgctgaagcttgtttaaagctaggtgttgatattattaatgatcaatgggcggggctgtatgatcatcatatgttccaagttgtagccaactacgatgcggaaattgttttaatgcataatggcaatggcgaacgtgaggaaccagttgttgaagaaatgttgacatctttacttgcacaagcccatcaagctaaaatgtcaggtgtttcagtagataaaatttggctagatccgggaattggttttgccaagacaagagaagaggaagctgaagtaatggcaaggctggatgaacttgtggccacagggtatccagttttattagcgacaagccggaaacgtttcactaaagagatgatgggttatgatacaacaccggttgaaagggatgaagtgactgctgcaacgacagcgtatggtattatgaagggtgttaaagcagtacgcgtacataatgttgcgttaaatgctaaattagctaaaggtatagattttttaaaggagaatgaaaatgcaagacacaatctttcttaaaggtatgcgcttttatggatatcatggtgctttatcggctgaaaatgaaatagggcaaatttttaaagtggatgtaactttgaaagtagacttagctgaagctggtcgtactgataatgttattgatacagttcattatggtgaagtgttcgaagaggttaaatcaattatggaaggtaaggccgttaatttacttgagcatctagctgaacgtattgcaaatcgtataaattcacaatataatcgtgtaatggaaacgaaagtgagaatcactaaagaaaacccaccgattccgggtcattatgatggagtaggtatcgaaatagtgagggagaataaatgattcaagcatacttaggattaggtagtaatattggtgatagagaaagccagttaaacgatgctataaagattttgaatgaatatgatggtattaacgtatctaatatttctccgatttatgaaacagcaccagttgggtatactgagcaacctaactttttaaatttgtgtgttgaaattcaaacaacactcacagtattacaactgttggaatgttgtttgaagacagaagaatgtttacaccgtgttagaaaggaacgatggggtcctagaactttagatgtggatatcttgttgtatggagaagaaatgatagatttaccaaaactgtcggtgccacatccgagaatgaatgaacgtgcatttgttttaatcccattaaatgatatagcagcaaatgtcatagaaccacgttcgaaattgaaagtgaaagatttagtttttgtcgatgacagtgtaaagagatataaataatgtattgttgagaacattcatatttattgggaatagatgattgattattggagatgtttccgcattttgattatctctaaatgcatttgatttcgaattagtatatgatgatttagtatgtgttagaattaagttatttcataaaatcaaagtaagcaatatttgataaattgctgtaatttatttgggcttttgttgaagtttgtggaagaaaattttatacatttacttagggttgtattaatgataatcgtattttaaatgaataagtaattcataaacgaaaacagaaatagctttattacatttacaacctcttgtaaaattaaaaaagtgataaaattgatgttatgaatataagaaaacatgctacatcataactttaaggtgtaatggttaatgataaagtattagaaacatcgaaagagatgtatgttgagcaaaaatgtctgatattttataaaactttaaaggaaaatgtttgagtgtaccagttggaatactaaaggattacaacaagttaaaggagagaaagttatgtcagaagaaatgaatgaccaaatgttggttcgacgtcaaaaattacaagaattatatgatcttggtatagacccgtttggttctaaatttgaccgttcaggtttatctagtgatttgaaagaagagtgggaccagtattctaaagaagaattggtagaaaaagaagcggatagtcatgtcgctatagctggacgattaatgactaagcgtggtaaaggtaaagcaggatttgcacacgttcaggacttagctggacaaattcaaatttacgttcgtaaagatcaagttggtgataacgaatttgatttatggaaaaatgctgatttaggcgatatcgttggtgttgaaggtgtaatgttcaaaacaaatactggcgaattatcggttaaagcgaagaaattcacgctactaactaaatcattgcgaccattaccggataaattccacggtttacaggatattgaacagagatatcgtcaaagatatttagatttaattacgaacgaagatagcactcgtacatttattaatcgtagtaaaatcattcaagaaatgcgtaattatttaaataataaaggtttcttggaagtagaaacacctatgatgcaccaaattgctggtggcgcagctgctagaccatttgtaacacatcataatgcattagatgcaacgttatacatgcgtattgctattgagttgcatttgaaacgtttaattgtcggtggacttgaaaaagtatatgaaattggtagagtattccgtaatgaaggtgtatcaactagacataaccctgaattcacaatgattgaattatatgaagcatatgcagattatcatgacattatggatttaacagaatctatggtgagacatattgccaatgaagtattaggttctgcaaaagtacaatataatggggaaacgattgatttagaatctgcatggactcgtttgcatattgttgatgctgtaaaaaaagctactggtgtagatttttatgaagttaaaagtgatgaagaagctaaagctttagctaaagaacatggtattgaaattaaagatacaatgaaatatggtcatattttaaatgaattctttgagcaaaaagttgaagaaacacttattcagccaacgtttatctatggtcatccgactgaaatttcacctttagcgaagaaaaatcctgaagatcctagatttactgatcgtttcgaattgttcattgtaggtagagagcatgcaaatgcatttactgaattaaatgatcctattgatcaaaaaggtcgttttgaagcgcaacttgttgaaaaagcgcaaggtaatgatgaagcgcatgaaatggatgaagattacattgaagcgttagaatatggtatgcctccgacaggtggtcttggtatcggtattgacagattagttatgttattaactgactctccatcaatcagagacgtattattattcccttatatgagacaaaaataaatgacgttgattgttagtaagagctctcgtgtatacaacatgtgtatgcgagggttttcttaattatggtaattagttcgtgtttgaatgtttttgatagtaatagttaacgataatggtgctatttttgactgttaaacaaggtagttagctgatagatgaaaatgacgatacgtatatagagtagttctgatgagaaatgttaatgatagacattgagatatcttataacaaaaattgctatattagtataatttatcttaatcagctataaaagtactttaaaattgtatagaatgtgtatggttttgtacatatgtgtatgatagaatactaaaagtgttgtgaattagagagcacgagaaatgtcagttttgaagaataaaaaagttgattaaaagtgttgactttatcaattgaatgaagtaatatataaaagtcgtcaaaaacagacgaaacacactaaaagctggtgtgacaaagttcacaacaaagtgtaaaattaactattgcaccttattaattaagcgtgtatcataaataagtaagttattttgtctggtgactatagcaaggaggtcacacctgttcccatgccgaacacagaagttaagctccttagcgtcgatggtagtcgaacttacgttccgatagagtagaacgttgccaggcagatgacaaatcggaggattagctcagctgggagagcatctgccttacaagcagagggtcggcggttcgaacccgtcattctccaccatttattcttacatatagccggcctagctcaattggtagagcaactgacttgtaatcagtaggttgggggttcaagtcctctggccggcaccatcttttgagccattagctcagctggtagagcatctgacttttaatcagagggtcagaggttcgaatcctctatggctcattacgatttaatttttatatttagcaaaataatgcagaagtagttcagcggtagaatacaaccttgccaaggttggggtcgcgggttcgaatcccgtcttctgctccattattttgccggggtggcggaactggcagacgcacaggacttaaaatcctgcggtgagagatcaccgtaccggttcgattccggtcctcggcaccattttagcgcccgtagctcaattggatagagcgtttgactacggatcaagaggttatgggttcgactcctatcgggcgcgccatttttaaattaattgaataacgggaagtagctcagcttggtagagcacttggtttgggaccaaggggtcgcaggttcgaatcctgtcttcccgattacttcttaaattccattttatgggggcttagctcagctgggagagcgcctgctttgcacgcaggaggtcagcggttcgatcccgctagtctccaccatttatttttacacgatgaacattgaaaactgaatgacaatatgtcaacgttaattccaaaaacgtaactattagttacaaacattatttagtatttatgagctaatcaaacatcataattttatggagagtttgatcctggctcaggatgaacgctggcggcgtgcctaatacatgcaagtcgagcgaacggacgagaagcttgcttctctgatgttagcggcggacgggtgagtaacacgtggataacctacctataagactgggataacttcgggaaaccggagctaataccggataatattttgaaccgcatggttcaaaagtgaaagacggtcttgctgtcacttatagatggatccgcgctgcattagctagttggtaaggtaacggcttaccaaggcaacgatgcatagccgacctgagagggtgatcggccacactggaactgagacacggtccagactcctacgggaggcagcagtagggaatcttccgcaatgggcgaaagcctgacggagcaacgccgcgtgagtgatgaaggtcttcggatcgtaaaactctgttattagggaagaacatatgtgtaagtaactgtgcacatcttgacggtacctaatcagaaagccacggctaactacgtgccagcagccgcggtaatacgtaggtggcaagcgttatccggaattattgggcgtaaagcgcgcgtaggcggttttttaagtctgatgtgaaagcccacggctcaaccgtggagggtcattggaaactggaaaacttgagtgcagaagaggaaagtggaattccatgtgtagcggtgaaatgcgcagagatatggaggaacaccagtggcgaaggcgactttctggtctgtaactgacgctgatgtgcgaaagcgtggggatcaaacaggattagataccctggtagtccacgccgtaaacgatgagtgctaagtgttagggggtttccgccccttagtgctgcagctaacgcattaagcactccgcctggggagtacgaccgcaaggttgaaactcaaaggaattgacggggacccgcacaagcggtggagcatgtggtttaattcgaagcaacgcgaagaaccttaccaaatcttgacatcctttgacaactctagagatagagccttccccttcgggggacaaagtgacaggtggtgcatggttgtcgtcagctcgtgtcgtgagatgttgggttaagtcccgcaacgagcgcaacccttaagcttagttgccatcattaagttgggcactctaagttgactgccggtgacaaaccggaggaaggtggggatgacgtcaaatcatcatgccccttatgatttgggctacacacgtgctacaatggacaatacaaagggcagcgaaaccgcgaggtcaagcaaatcccataaagttgttctcagttcggattgtagtctgcaactcgactacatgaagctggaatcgctagtaatcgtagatcagcatgctacggtgaatacgttcccgggtcttgtacacaccgcccgtcacaccacgagagtttgtaacacccgaagccggtggagtaaccttttaggagctagccgtcgaaggtgggacaaatgattggggtgaagtcgtaacaaggtagccgtatcggaaggtgcggctggatcacctcctttctaaggatatattcggaacatcttcttcagaagatgcggaataacgtgacatattgtattcagttttgaatgtttatttaacattcaaatattttttggttaaagtgatattgcttatgcgagcgcttgactgaaaagaaattgtacattgaaaactagataagtaagtaaaatatagattttaccaagcaaaaccgagtgaataaagagttttaaataagcttgaattcataagaaataatcgctagtgttcgaaagaacactcacaagattaataacgcgtttcctgtaggatggaaacatagattaagttattaagggcgcacggtggatgccttggcactagaagccgatgaaggacgttactaacgacgatatgctttggggagctgtaagtaagctttgatccagagatttccgaatggggaaacccagcatgagttatgtcatgttatcgatatgtgaatacatagcatatcagaaggcacacccggagaactgaaacatcttagtacccggaggaagagaaagaaaattcgattcccttagtagcggcgagcgaaacgggaagagcccaaaccaacaagcttgcttgttggggttgtaggacactctatacggagttacaaaggacgacattagacgaatcatctggaaagatgaatcaaagaaggtaataatcctgtagtcgaaaatgttgtctctcttgagtggatcctgagtacgacggagcacgtgaaattccgtcggaatctgggaggaccatctcctaaggctaaatactctctagtgaccgatagtgaaccagtaccgtgagggaaaggtgaaaagcaccccggaaggggagtgaaatagaacctgaaaccgtgtgcttacaagtagtcagagcccgttaatgggtgatggcgtgccttttgtagaatgaaccggcgagttacgatttgatgcaaggttaagcagtaaatgtggagccgtagcgaaagcgagtctgaatagggcgtttagtatttggtcgtagacccgaaaccaggtgatctacccttggtcaggttgaagttcaggtaacactgaatggaggaccgaaccgacttacgttgaaaagtgagcggatgaactgagggtagcggagaaattccaatcgaacctggagatagctggttctctccgaaatagctttagggctagcctcaagtgatgattattggaggtagagcactgtttggacgaggggcccctctcgggttaccgaattcagacaaactccgaatgccaattaatttaacttgggagtcagaacatgggtgataaggtccgtgttcgaaagggaaacagcccagaccaccagctaaggtcccaaaatatatgttaagtggaaaaggatgtggcgttgcccagacaactaggatgttggcttagaagcagccatcatttaaagagtgcgtaatagctcactagtcgagtgacactgcgccgaaaatgtaccggggctaaacatattaccgaagctgtggattgtcctttggacaatggtaggagagcgttctaagggcgttgaagcatgatcgtaaggacatgtggagcgcttagaagtgagaatgccggtgtgagtagcgaaagacgggtgagaatcccgtccaccgattgactaaggtttccagaggaaggctcgtccgctctgggttagtcgggtcctaagctgaggccgacaggcgtaggcgatggataacaggttgatattcctgtaccacctataatcgttttaatcgatggggggacgcagtaggataggcgaagcgtgcgattggattgcacgtctaagcagtaaggctgagtattaggcaaatccggtactcgttaaggctgagctgtgatggggagaagacattgtgtcttcgagtcgttgatttcacactgccgagaaaagcctctagatagaaaataggtgcccgtaccgcaaaccgacacaggtagtcaagatgagaattctaaggtgagcgagcgaactctcgttaaggaactcggcaaaatgaccccgtaacttcgggagaaggggtgctctttagggttaacgcccagaagagccgcagtgaataggcccaagcgactgtttatcaaaaacacaggtctctgctaaaccgtaaggtgatgtataggggctgacgcctgcccggtgctggaaggttaagaggagtggttagcttctgcgaagctacgaatcgaagccccagtaaacggcggccgtaactataacggtcctaaggtagcgaaattccttgtcgggtaagttccgacccgcacgaaaggcgtaacgatttgggcactgtctcaacgagagactcggtgaaatcatagtacctgtgaagatgcaggttacccgcgacaggacggaaagaccccgtggagctttactgtagcctgatattgaaattcggcacagcttgtacaggataggtaggagcctttgaaacgtgagcgctagcttacgtggaggcgctggtgggatactaccctagctgtgttggctttctaacccgcaccacttatcgtggtgggagacagtgtcaggcgggcagtttgactggggcggtcgcctcctaaaaggtaacggaggcgctcaaaggttccctcagaatggttggaaatcattcatagagtgtaaaggcataagggagcttgactgcgagacctacaagtcgagcagggtcgaaagacggacttagtgatccggtggttccgcatggaagggccatcgctcaacggataaaagctaccccggggataacaggcttatctcccccaagagttcacatcgacggggaggtttggcacctcgatgtcggctcatcgcatcctggggctgtagtcggtcccaagggttgggctgttcgcccattaaagcggtacgcgagctgggttcagaacgtcgtgagacagttcggtccctatccgtcgtgggcgtaggaaatttgagaggagctgtccttagtacgagaggaccgggatggacatacctctggtgtaccagttgtcgtgccaacggcatagctgggtagctatgtgtggacgggataagtgctgaaagcatctaagcatgaagcccccctcaagatgagatttcccaacttcggttataagatccctcaaagatgatgaggttaataggttcgaggtggaagcatggtgacatgtggagctgacgaatactaatcgatcgaagacttaatcaaaataaatgttttgcgaagcaaaatcacttttacttactatctagttttgaatgtataaatctacattcatatgtctggtgactatagcaaggaggtcacacctgtttcccatgccgaacacagaagttaagctccttagcgtcgatggtagtcgaacttacgttccgctagagtagaacgttgccaggcaaaaatggatgcgatgagccgcattgagaccgcaaggtctcttttttttatttctaaaacgtcaaaataaaagttaacacaaagaaaaatggcttggcgaagtgaaaacgtttgaatctgacgaaacgagaaaagagcgcaacgagtttagtagagctaaatgagtaagcgagagccgaagaagaggaaagaagcaagcgattgtcacaagtcaagaaaggttcttagcgaggatggtagccaacttacgttccgctagagtagaactggaaatgataatttaataatgtacactttcgattgtctaagtatgtacaactttaattttgtgtttatataaatttaaaatgatatcatcgaaaacaaaatattgtataaatagagaagagcagtaagacggtatctaattgaaaatgatcttactgctcttttatatactttattgaaatacaaaaaggaaattaattattatacaatagacaagctattgcataagtaacactaacttttatcaaagaagtgttactttataattaatgattttattagagcgtctacatgcggttttaaagcatcatcgtctataccgccaaagcctaatataaatttaggggttttcttatagtcttgatcatcatcgaaattataaacttgtaattttaagtttactttgtttgctctatcaagacacttttgtaatgttaatccattttttactgtaattgtaaaatgcatacccgtttcagcaccttgaatatcaagctgctctttgtaaggtttcaatctttttaaaatataggttagttttctacgataaattcgtctcattttatttaaatgtctttcaaaaccaccggaagatataaacattgcaataagattttgcatatgaacaggtacagtgttgccttcaatgtgattttgagaatgatattttttcattatagaatagggtaacaccatatatgcaacacgacagctaggaaaaatagactttgaaaatgtactgatataaatcactttttctcctcttgaatatagaccttgaattgctggaatgggtttaccgaaatatctaaactcggaatcataatcatcttctataataaatcgttcttctttttcttgagcccattgtattaattgagttcgcttttttaagtccattacatatccagttggaaattgatgggaaggcgttatatatactatatttttttgtgatttaataacttcatctacgtttattccattatcttcaacttcaatttgttcatattcaacttgttttttatctaaaatatttttgattggtggataactaggtttttcgataataaacgttgaagtataaagtaaatcgactaattgatttactaattgttcggtagatgagccaattataatttgattaggatcacaaattacgccacgattagtaaataaataaaatgccagttgaaaccgcaaatgtaattctccttgaaaatggcctctaagtaatttatttgaatgggatttatcataaagatcttttgaatactttctgaaaagttctattgggaaatgcttcgtatctatttcatctaaattaaaagcgtaatcataagtttcgtcactagtttttggtttatatgaatcatcatcaaaaagagaatggataggttgagtatttaaaattgttaaagattcaatttcagatacataataaccagagcgaggtctcgaatatatgtatccttcgtctaataatagttgataagcatgctctactgttgtttggctaatagataaatgtttgcttaattgcctctttgaataaaacttatcaccttcttgaaattgaccttcaattatttgtttttttaatttttcataaagttgatggtataaagtgtttttcatttttaaaactgacctcctaattttgtattattttgcacctttttaaatatcagtttatacattacaatgaatttaatcaacttgaaaaggggttttatataaaatgagtaaaataattggatcagacagagtcaaaagaggtatggccgaaatgcaaaaaggcggcgttatcatggatgtcgttaatgctgagcaagcaagaattgcggaagaagcaggtgcggtagcagtcatggctttagagcgtgtaccttctgatattagagcagctggtggcgttgcacgtatggcaaaccctaaaattgtagaagaagtaatgaatgctgtttcaattcctgtaatggctaaagcacgtattggtcatattacagaagcaagagtattagaagctatgggtgttgactatattgatgaatcagaagtattaacaccagcagatgaggaatatcacttaagaaaagatcaatttacagtgccatttgtatgtggttgtcgtaatttaggtgaagctgcacgaagaatcggtgaaggtgctgctatgttacgtactaaaggtgaaccaggtacaggtaatattgttgaagctgtaagacatatgagacaagttaattctgaagttagtcgattgactgtaatgaatgatgatgagattatgacttttgcgaaagatatcggtgcgccttatgaaattttaaaacaaattaaagacaatggtcgtttaccggtagttaactttgcagctggtggcgttgcgactcctcaagatgctgctttaatgatggaattaggtgccgacggtgtattcgttggatcaggtatttttaaatcagaagatccagaaaaatttgctaaagcaattgttcaagcaacaacacattaccaagactatgaactaattggaagattagcaagtgaacttggcactgctatgaaaggtttagatatcaatcaattatcattagaagaacgtatgcaagagcgtggttggtaagatatgaaaataggtgtattagcattacaaggtgcagtacgtgaacatattagacatattgaattaagtggtcatgaaggtattgcagttaaaaaagttgaacaattagaagaaatcgagggcttaatattacctggtggcgagtctacaacgttacgtcgattaatgaatttatatggatttaaagaggctttacaaaattcaactttacctatgtttggtacatgcgcaggattaatagttctagcgcaagatatagttggtgaagaaggataccttaaaaagttgaatattactgtacaacgaaactcattcggtagacaagttgacagctttgaaacagaattagatattaaaggtatcgctacagatattgaaggtgtctttataagagcgccacatattgaaaaagtaggtcaaggcgtagatatcctatgtaaggttaatgagaaaattgtagctgtccagcaaggtaaatatttaggcgtatcattccatcctgaattaacagatgactatagagtaactgattactttattaatcatattgtaaaaaaagcatagcttaatgtatgctaaatcaacgaattattgatatttatagatttgttgagaagaaaataactccttcaaacttagttttggaggagttattttttatgtcaaaattaaaaatgatagaaaataaagatatacataagaaaaaaccccttcaaagagactgagaatagtcaaaattttgaaggggttaattcgatgttgatgtatttgttaaataaagaatccagcgattgcagctgaaatgaaagatactagtgttgcaccgaataataatttcaaaccaaagcgggcaactgtatctccttttttgtcattaagtgatttaatcgcacctgaaataataccaatagagctaaagttagcaaatgatactaagaatacagatgtaacaccttttgcgtgttcagataaatcactaagtttaccaagtgcttgcattgctacaaattcgttagataatagttttgtcgccataactgaaccggcttgaactgcatcttgccatggcacaccgactaagaatgcaaatggtgcaaagacaaaaccaattaatgtttggaaatcccaagaaatagcgccacctgaaactgtactaaagatattgcttacaattccatttaatagagcgataatggcaatgtatccgattaacattgcgcctacaatgacagctactttaaatccatctaaaatatattctcctagcatttcgaagaatgattgctgtctttcttcagtttcttcaactaataatttgtcatcttcttcattaactttataagggttaataattgaagcgatgatgaaaccaccaaataagtttaagacaacagccgttacaacatatttaggttcaattaaggtaaagtatgcaccgataattgaagcagatacagtcgacattgctgaagctgttaatgtgtataaacgttgcttaggtatgtatggtaattgttttttaattgaaataaatacttcagattgtcccaaaattgctgcagcaactgcattgtatgattctaaacgtcccataccattaattttagaaattaagaatcctaaaacattaatgattaaaggtaaaatctttgtgtattgaaggataccgataatcgctgaaataaatacgataggtaataatacactgaagaagaatggtggttgcttaggatcgatatattgaataccaccgaatacaaagttaacaccatctgcagcttttaataataagtagttaaaaccgtttgaaataccaccaataaccttgattcccattgtagttttaagcaagataaatgcaaagataagctgaattgcaagtaaaattcctacatatttccagcgaatatttttcctgtctgagctaaatagaaacgcaagtgccaaaaagaagataattccgataatcccaattagaatatgcatatatttctcattcctttagttttttctacaatctatcatacaataaaatggaagggctaacatcataaatttttgaaaatataaaaacaaattaattgaaaaaggtcaaaataggtcatataatatagtcaaagaaggtcaaaaaggggtgatatacatgcacaatatgtctgacatcatagaacaatacatcaaacgtttatttgaagagtcgaatgaggatgtcgtcgaaattcagagagcgaatatcgcacagcgttttgattgcgtaccatcacaattaaactatgtaatcaaaacacgattcactaatgaacatggttatgaaatcgaaagtaaacgtggtggtggtggttacatccgaatcactaaaattgaaaataaagatgcaacaggttatattaatcatttgcttcagttgattggaccttctatttctcaacaacaagcttattatattattgatgggcttttagataaaatgttaataaatgaacgtgaagctaaaatgattcaagcagttattgatagagaaacgctatcaatggatatggtttctagagatattattagagcaaatattttaaaacgtttgttaccagttataaattattactaaatgaaatgaggtgtcgaagtgctttgtgaaaattgtcaacttaatgaagcggaattaaaagttaaagttacaagtaaaaataaaaccgaagaaaaaatggtgtgtcaaacttgtgctgaggggcaccatccgtggaatcaagctaatgaacaacctgaatatcaagaacatcaagataattttgaagaagcatttgttgttaagcaaattttacaacatttagctacgaaacatggcattaattttcaagaagtagcgtttaaagaagaaaaacgttgcccatcatgtcatatgactttgaaagatattgcacatgttggtaaatttgggtgtgctaattgttatgcaacatttaaagatgacatcattgatatcgtccgcagagttcaaggtggacaatttgagcacgttggaaagacaccacattcttcacataaaaagatagctttaaagagaaaaatcgaagaaaagaatgaatatttgaaaaaacttattgaaatccaagattttgaggaagcagccattgttagagatgaaattaaagcactaaaagctgagagtgaggtgcaacatgatgacgcataatattcatgataatatcagccaatggatgaaaagtaatgaagaaacaccaattgttatgtcttctagaattcggttagcgcgtaatttagaaaatcatgtgcatccactaatgtatgctactgaaaatgatggatttagagttataaatgaggtacaagatgccttgccaaattttgaattaatgcgtcttgatcaaatggatcaacaaagtaaaatgaaaatggttgcaaagcatttgattagtcctgaactaataaaacaaccagcagccgcagtattagtgaatgatgatgaatctttaagtgtcatgataaatgaagaggatcatattcgtattcaagctatgggaactgacacgacattacaggctttatataatcaagcttcatcaattgatgatgaattagatcgaagccttgatataagttatgatgaacaacttggttatttaactacatgtcctaccaatataggtactggtatgagagcaagcgtgatgctacatttaccaggtctatctattatgaaaagaatgacacggattgctcaaaccattaatcgttttggatatacaatcagaggtatttacggtgaaggttcgcaagtttatggacatacttatcaagtatccaaccaacttacacttggtaaatctgagttagaaatcatagaaacattaacagaagttgttaatcaaatcattcatgaagaaaaacaaatacgacaaaagttagacacttataatcaattagaaacacaagaccgtgtttttcgctcgctaggtattttacaaaactgtagaatgataactatggaagaggcttcttatagattaagcgaagttaaacttggtatagatttaaattacattgaattacaaaactttaaatttaatgaattgatggtagctatacagacaccatttttattagatgaagaagatgacaaatctgtaaaagaaaaacgagcagatatactaagagaacatataaagtaggaggtcattatttatgttatttggtagattaactgaacgtgcacagcgcgtattagcacatgcacaagaagaagcaattcgtttaaatcattcaaatataggaacagaacacctattattggggttaatgaaagaacctgaaggaattgctgcaaaagtattagaaagttttaatatcactgaagataaagtaattgaagaagttgaaaaattaattggacatggtcaagatcatgttggtacattgcattatacacctagagctaaaaaagtcattgaattatcgatggatgaagctagaaaattacatcacaattttgttggaacggaacatattttattaggcttgattcgtgaaaatgaaggtgttgcagcaagagtttttgcaaatctagatttaaatattactaaagcacgtgcacaagttgtgaaagctttaggaaaccctgaaatgagtaataaaaatgcacaagctagtaagtcaaataatactccaactttagatagtttagctcgtgacttaacagtcattgccaaagacggtacattagatcctgttataggacgtgataaagaaattacacgtgtaattgaagtgttaagtagacgtacgaaaaacaatcctgtacttattggagaaccaggtgttggtaaaactgctattgctgaaggtttagcgcaagctatagtgaataatgaggtgccagagacattaaaagataagcgtgttatgtctttagatatgggaacagtagttgcaggtactaaatatcgtggtgaatttgaagagcgtctgaaaaaggttatggaagaaatccaacaagcaggtaatgtcatcctatttattgatgagttgcatactttagtcggtgctggtggtgctgaaggtgctatcgatgcttcgaatattttgaaaccggcattagcacgtggtgaattacaatgtattggtgctactacattagatgaatatcgcaaaaatattgaaaaagacgcggctttagaacgtcgtttccaacctgtacaagttgatgaaccttcagtagtagatacagttgctattttaaaaggattaagagatcgttacgaagcacaccatcgtattaatatttcagacgaagctattgaagcggctgttaaattaagtaacagatacgtttcagatcgtttcttaccagataaagcaattgatttaattgatgaagcaagttctaaagtaagacttaagagtcatacgacacctaataatttaaaagaaattgaacaagaaattgaaaaagttaaaaatgaaaaagatgccgcagtacatgctcaagagtttgaaaatgctgctaatctgcgtgataaacaaacaaaacttgaaaagcaatatgaagaagctaaaaatgaatggaagaacgcacaaaatggcatgtcaacttcattgtcagaagaagatattgctgaagtcattgcaggatggacaggtatcccattaactaaaatcaatgaaacagaatctgaaaaacttcttagtctagaagatacattacatgagagagttattgggcaaaaagatgctgttaattcaatcagtaaagcggttagacgtgcccgtgcagggttaaaagatcctaaacgaccaattggtagctttatcttccttggaccaactggtgttggtaaaactgaattagctagagctttagctgaatcaatgttcggcgatgatgatgcgatgattcgtgtagacatgagtgaatttatggaaaaacacgcagtgagccgattagttggtgctcctccaggatatgttggtcatgatgatggtggacaattaactgaaaaagttagacgtaaaccatattctgtaattttatttgatgaaattgaaaaagcacatccagatgtatttaatattctattacaagttttagatgacggacatttgacagatacaaaaggacgtacagttgatttcagaaatacaattatcataatgacatcaaacgttggagcacaagaattacaagatcaacgatttgctggattcggtggttcaagtgatggacaagattatgaaacaattcgaaaaacgatgttaaaagaattaaaaaattcattccgtccagaatttttaaaccgtgtagatgatatcattgtattccataaactaacaaaagaagaattaaaagaaattgtaacaatgatggttaataaattaacaaatcgattatccgaacaaaacataaatattattgttactgataaagcgaaagacaaaatcgcagaagaaggatatgatccagaatatggtgcaagaccattaattagagcgatacaaaaaactatcgaagataatttaagtgaattaatattagatggtaatcaaattgaaggtaagaaagttacagtagatcatgatggtaaagagtttaaatatgacattgctgaacaaacttcagaaactaaaacaccatcgcaagcataaatataaaacagtccaaaacaaattaaagttttgggctgtttttttagtagcattgaactatagaaattcgtgaaagtatccatcaacgaaacaatctaataaaataatcatcaaaggatagttaagaattatatgaaacaagttaatgagcctacagcgatagcataaaggtatgaatttttataaaggttttttgtttgaagatactagcaacttacgtcaaaataaaataggtctatataatattgtgataaatctagagaaaagagtttactaagaaattattaagattttatctttgaaagataccgactatcaacatgatgtaagtttattttataatattcataaaaaataaatctgataaaacagtttgcgttagtagtcatgttaaaatacaaacaaatgtaactcacatttaatttgtcataatgggaatgtgcgtttaaaatagatttattcaaaggaaagtggaggtgcaattttggccaagaaaaaagtgatttttgaatgtatggcttgtggttatcaatctcctaaatggatggggaaatgtcctaattgtggcgcttggaatcaaatggaggaaattgttgaaaaagcagccaatcctaaacatggagtgaaaaccaaggaattagcaggtaaagtacaaaaattaaatagtattaaacatgaaacaacgccgagagtgttaacagattcagcagaattcaaccgtgtattaggtggaggtattgtgagtggatcgttagtacttattggtggggatccaggtattggtaagtcaacgttacttttacaaatttgtgcatcgttatctcaaaagaaaaaagtactatatattactggagaagaatcgcttagtcagactaaattacgtgcagagcggttagatgaagattcaagtgaattgcaagtattagctgaaacagatcttgaagttatttatcaaacagtaaaagaagaacaacctgatttactagtagtggattcgattcaaacaatatatcatcctgaaatcagctctgcgccaggttctgtttcacaagttcgtgaaagtacacaaagtttaatgaatattgctaaacaaatgaacattgcaacttttatagtgggtcatgtaacgaaagaaggtcaaattgctggcccaagattgctagaacacatggttgatactgtgctttattttgaaggcgatgaacaccacgcatatcgaattttgcgagctgttaaaaaccgttttggttcaacgaatgaaatgggaatcttcgaaatgaagcaaagtggattaaaaggtgtaaataatccatctgaaatgtttttagaagaacgttcaacaaatgttccaggttcaacaattgttgcaaccatggagggaaccagaccacttttaatagaagttcaagcgctggtaactccaacgacttttaacaatccgagacgaatggcaacagggattgatcataatcgattaagtttgttgatggctgttttggaaaagaaagaaaattatctattacaacaacaagatgcttatatcaaagtagctggcggtgtaaagttaacggagccagcagttgatttaagtgtaattgtagcaactgcgtctagctttaaagataaagctgtcgacggattagattgctatattggagaagttggtttaacgggtgaggtacgtcgtgtatctcggatagaacaacgcgtgcaagaggctgcaaaactaggtttcaaacgtgtaattattcctaaaaataatataggcggatggacatatcctgaaggtatacaagtaataggtgtaactactgtacatgaagcattgtcatttgctcttcattcataaaacatcaagaaaggaggacattgtgtgaatatcgttaaactaatggttattattatttacttaattattgggagcgcattaggaataattattattcctgaaattgcaaatgatcttggattacaaaactccagctttttaaaaaatcactatgtagatggcattatcggtagtatttttatgttcttaatttttggtgtatttattagacgagttactaacgctataaaaggtttagaacattttattatgcgtagaagtgctgttgaaatactattcgcaacaataggtttaataatcggattacttatttctgttatggtgtcgtttatattagaatcaattggcaactctatttttaatcatttcattcctgtcataattacgatattactatgttatttcggtttccaatttggccttaaaaaacgagatgaaatgttaatgtttttacctgagaatatagcacgttccatgtcacaacatactaaaagtgctacgccaaaaattatcgacacaagcgcaattattgatggtcgtattttagaagtcattcgttgcggttttatcgatggcaatattttaattccacaaggtgttattaacgaattacaaattgttgcagattcaaatgacagtgttaaacgtgaaaagggtaaaagaggcttagatattttaaatgaattgtatgatttagactatcctacaaaggttatacatccaactaaaacacatagtgatattgatacaatgctattaaaactagcaaaacaatatcatgcaagtattattacaacagatttcaacctaaataaagtttgtcatgtacatggtatcaaagcattaaatgttaatgatttatcagaagcaatcaaacctaatgtacatcaaggtgatcaactacatattttactgacaaaaatgggtaaagagcctggtcaggcagtaggatatctagatgatggtacgatggtagttgttgataatgctaaaaatcttattggcagtcatgtcaatttagaagtagtcagcttattgcaaacatcttcaggaagaattgtttttgctaaaaaaatcgaagatacagtatcattataaaaactgtagttgacgaaaacaaaatagatattaaaaggtatatgaaatggcgaagtttgtaatttgaagtataactataaataaatgcaaaacatatcagttatcaaaaaatacaaatagtgctaatatatcattgaaacaagttcattaagtgttaagttttagatattaataaagttattcttatagcaatcaagacatacaaaattagaatcaattttaacgtatttgaatagttaatttgaagtttaattttacagtacataatgttcatttttaagtcgttgaaatgcgtatgtagtgcagtcttgattcttagggatagcttttttaaagtgttgaaaaaacaactgctttctatttaaaatttaagcatattacccagggaattatgttatgattaaacaatgaaattattttaaggtcatgttaaaaagcattgtttcgttttaacaataagacgagttacacatttgttatgacggtcgaagatagcaaatgaacaatttatatgaactaacttgaaaatctgatatttaatttaggagtgaaaaaaatgagcgatcgtataagagtaagatatgcaccaagtccaactggttatcttcatattggtaatgcaagaacagcattattcaattacttgtatgctaaacattataacggagattttgtgattcgaattgaagatactgataaaaaacgtaatttagaagatggagaaacatcacaatttgataatcttaaatggttaggattagattgggatgaatctgtagataaagacaatggctacggaccatatcgtcaatctgaacgtcaacatatctaccaaccattaatagatcagttactagcaaaagataaagcatataaatgctatatgacagaagaagaattagaagctgaacgtgaagcgcaaatcgctcgtggtgaaatgcctcgctatggtggtcaacatgcgcatttgactgaagaacaacgtcaacaatttgaagcagaaggacgccaaccatcaattcgtttccgagtacctcaaaaccaaacgtattcttttgatgatatggtaaaagggaatatttcatttgattcaaatggtattggtgactgggttatcgttaaaaaagatggcattccaacgtacaattttgcagtagctatagatgatcattacatggaaatttcagatgttattcgtggtgatgatcatatttcaaacacgcctaaacaaattatgatttatgaagcatttggctgggagccgcctcgttttggtcatatgtcattaattgttaatgaagaacgtaaaaagttaagtaaacgtgatgggcaaattttacaatttattgagcaatatcgtgacttaggttatttacctgaagcgttatttaattttattgcgttattaggttggtctcctgaaggtgaagaagaaatcttttctaaagaagaatttatcaaaatctttgatgaaaagcgtttgtcaaaatcaccagcatttttcgataagcaaaaattagcatgggttaataaccaatatatgaaacaaaaagatactgaaacagtattccaattagcattacctcatttaattaaagcgaatttgattcctgaggtgccgtcagaagaggatttatcttggggacgcaaattaattgcgctttatcaaaaagaaatgagttatgccggtgaaattgttcctttatcagaaatgttctttaaagaaatgccagctcttggtgaagaagaacaacaagtgatcaatggagagcaagtaccagagttaatgacgcacttattcagtaaattagaagcacttgaaccatttgaagcggctgaaattaaaaaggcaattaaagaagttcaaaaagaaacaggaataaaaggcaagcaattatttatgcctattcgtgttgctgtaacaggccaaatgcatggtcctgaattaccaaatacaattgaagtacttggaaaagaaaaagtgctaaaccgtttaaaacaatataagtaatgaaatagacaagatcaaggtagtatatacttgaattttataacgtaaccacatatgataaagttgtattaacaaattacaacaatatgaatagagtattttatataaaacgaaggattagtaattaaatttatacgatgcagagagtgtacggttgctgtgagtacaacgtagaaattaatgaatgcaccttcgtaaaatgaattaaatatataatgagagtgatgagcattaagttgacatagtttccttgataatttggaagcgcccgcaatattattaatgttattcgctaaattcagagtggaaccgtgcggaagcgcctctaacaatacaatttgtatgttagtggtgctttttttgatatttaatttcgcaggtacttcaattatgtatttacgtagttcaatcattgaggaggaaatgatcttgttaaaaagaatgagagacgatataaaaatggtatttgagcaggatccagcggcacgttcaacattagaagtcattacaacgtatgcaggtttacatgcagtttggagtcatttgattgcacataagttatacaaccaaaaaaaatatgttgcagcacgcgcgatatctcaaatttcaagatttttcacaggtatagaaatccatccaggtgctaaaattggaaagcgtctatttatagatcatggtatgggcgttgtaataggagaaacatgtacaattggtgataatgtgacaatctatcaaggcgtgacacttggtgggacagggaaagaaagagggaaaagacacccagatataggagacaatgttttaatagcagcgggtgcgaaagttttaggaaatattaaaataaattcaaatgtaaatattggtgcaaattcagttgttttacaatcagttccaagttattcaacggttgttggtataccaggacatattgttaagcaagatggtgttcgagttggaaaaacatttgatcatcgccatctacctgatccaatttatgaacaaattaagcatttagaacgacaacttgaaaagactaggaatggagagattcaagatgattacattatataatacacttacacgtcaaaaagaagtgttcaagccaatagaaccaggaaaggtaaaaatgtatgtatgtggtcctacggtatataactacattcatattggtaacgcaagaccagcaattaattatgacgtagtgagacgttactttgaataccaaggatataatgtagaatatgtatcaaattttacagatgtagatgataaattaattaaacgttctcaagaattaaatcagtctgttcccgaaattgcagaaaaatatatcgctgcttttcatgaagatgttggtgctttaaatgttagaaaagcgacttcaaatccaagggtaatggaccatatggatgacattattcaatttattaaaaatttggttgatcaaggttatgcatatgaaagtggtggcgatgtttactttagaacacgtaaatttgaaggttatggtaaattaagtcatcaatccatagatgacttaaaagtgggtgctcgtatagatgcaggagagcataaggaagatgcacttgattttacattgtggaaaaaagcgaagcctggcgagattagttgggatagcccatttggtgaagggagaccaggatggcatattgaatgttctgtaatggcatttcatgagctaggacctacaattgatatacatgcgggtggttcagatttacaatttccacatcatgaaaatgaaatagcacaatcggaagcacataatcatgcgccatttgctaattattggatgcataatggtttcattaatattgataatgaaaaaatgagtaaatcactaggtaactttattttagttcacgatattattaaagaagttgatccagatgtactaagattctttatgattagcgtacattatagaagtccaattaactataatctagaattggttgaatcagcacgtagtggactagagcgtattcgcaatagttatcaattaattgaagagcgcgcacaaattgctactaatattgaaaatcaacagacatatattgatcaaattgatgagattttaaatcgttttgaaacagttatgaatgatgattttaatacagctaatgcaattacagcttggtatgatttagcaaaacttgcgaataaatatgtactagagaatacaacatcaacagaagtaattgataaatttaaagcagtttatcaaattttcagcgatgttttaggtgtaccgttaaaatctaaaaatgcagatgaattattggatgaagatgttgaaaaattaatcgaagagcgtaatgaagcaaggaaaaacaaagattttgcacgagcagatgagattcgagacatgctgaaatcacaaaacattatattagaagacacacctcaaggggttagatttaaacgtggataatcaacaagataatcacattaaattattgaatccattgaccttagcatatatgggagacgcagtcttagatcaatatgtacgtacgtatatcgttttaaagcttaaaagtaagcctaataaactacatcaaatgtctaaaaaatatgtatctgccaaaagtcaggcgcaaacgttagaatatttaatggagcaagaatggtttacagatgaagaaatggatattttgaagcgagggcgtaacgcgaaaagtcatactaaagctaaaaacactgatgttcaaacatatcgtaaaagttcagcgatagaagcagtgataggttttctttatttagaaaaaagagaagaacgattagaggcattattaaataaaataataacaatagtaaacgaaaggtagtgacaatgtggaagatacggttattgttggtaggcatgctgttagagaagcgattattactgggcatccgataaataagatattgattcaagaaggtattaaaaagcaacaaattaatgaaattttaaaaaatgcaaaagatcaaaaaatcattgttcaaactgtaccaaaatctaaattagattttttagcaaatgcaccacatcagggtgttgcagcgctaattgcaccatatgaatatgctgacttcgatcaatttttaaaacagcaaaaagaaaaagaaggtttatcgacagtacttatattagacggcttagaagacccgcataacttgggatcaattttaagaacagcagatgcgacgggagttgatggtgttattattcctaaacgtcgttcagttacactaacgcaaacagttgcaaaagcctcaacaggtgcaattgaacatgtaccagttattcgagtgacaaatttagctaaaactatcgatgaactaaaagataatggtttttgggtagctggcactgaagctaataatgcaacagattatagaaatcttgaagcggacatgtcattggctattgtaattggcagcgaaggacagggtatgagtcgtctagtaagtgataaatgcgatttctatattaagattccaatggttggacatgtaaacagtttgaatgcttcggttgcagcaagtttaatgatgtacgaagtatttcgaaaaagacatgatgttggagaaatataatgaaagaacgttacttaatcattgatggatacaatatgataggacaatcaccaacgctaagcgccattgcaaaagaaaatttagaagaagctagaatgcaattaatagatgcaattgcaaattataatgctgttatttcagatgaaattatttgtgttttcgatgcttatgaccaatcgggtgttgaaagagaatacatgtatcatggcgttaaaacgatttttaccaaggaaaaagaaacagctgatagtttcatagaacgttatgtctatgaactttatgacaagcacactaagcatattacagttgtaacaagtgatatgagtgagcaacatgctatctttggatcaggtgcatatagaatatcatctcgcgaaatgtggagagatttaaaagaaaatgaaattgatgtgagtaaatcattagatgatataagtgaaaacaagccaagaactcgaattccgttatcttctgaaatccttgcagaatttgaaaaaatacgaagaggacatcataagaaatgacatttccgtcatcttgaaattttgaatgtaacaatattaaactaaccttaaattttagatagaaggggttagtttaatacttgaaatatgatttgacaactcaagacagtacaatcaaacgtaacaatgcaataaatgataaagacttcgaaaagttagtaatggatctacaaccattaattattcgacgcatcaaaacatttggatttaatcattatgatttagaagacttatatcaagaaatacttatacggatgtataggtcggtccaaacatttgattttagtggagaacagcctttcacaaattatgttcaatgtttaattacgtctgtaaagtatgattatttgagaaaatatttagctacaaataaaagaatggataatttgattaatgaatatagagttacgtatccatgtgcaataaagcgttatgatgttgaaaacaattatttgaataaattagcaattaaagagttgattcgtcagtttaagtatttgagtgcatttgaaaaagatgtcatgtatttaatgtgtgaacaatataagccgagagaaattgctcaactgatgcatgtaaaagagaaagtgatttataatgccatacaacgatgtaaaaataaaataaagcgttatttcaaaatgatttgaaaagcgccttaggacgtggattgaattagaacgtgttacttcttgatggtttgacatttgttataaattttatgtatagtatactggtattataatgaataaaggtgaattattgtgaggaaaatacctttaaattgtgaagcttgtggcaatagaaattataatgttcctaagcaagaaggctcggcaacaagattaaccttaaagaaatattgtccaaaatgtaacgcgcacacaattcataaagaatcgaaataaatacattcgaaataatactttgataatatgttcaaaggatttggaggttgagcagatggctaaaaaagaaagtttctttaaaggcgttaagtctgaaatggaaaaaacaagttggccgacgaaagaagagctatttaaatatactgtaattgtagtttctactgttatattcttcttagtctttttctatgccttagatttaggaattacagcattgaaaaatttattatttggttagaggagtgaagacatgtctgaagaagttggcgcaaagcgttggtatgcagtgcatacatattctggatatgaaaataaagttaaaaagaatttagaaaaaagagtagaatctatgaatatgactgaacaaatctttagagtagtcataccggaagaagaagaaactcaagtaaaagatggcaaagctaaaacgactgttaaaaaaacattccctggatatgttttagtggaattaatcatgacagatgaatcatggtatgtggtaagaaatacaccaggcgttactggttttgtaggttctgcaggtgcagggtctaagccaaatccgttgttaccagaagaagttcgcttcatcttaaaacaaatgggtcttaaagaaaagactatcgatgttgaactcgaagttggagagcaagttcgtattaaatcaggtccatttgcgaatcaagttggtgaagttcaagaaattgaaacagataagtttaagctaacagtattagtagatatgtttggccgagaaacaccagtagaagttgaattcgatcaaatagaaaagctttaattaacaattaaagttattaaactaaccaaaagataaaaaagagtattgattttttaattagaaaagtgttaaaattatgtggtcgcgcttttagagcgcccatttcgtcacgaaatgttaagagtgggagggcaaaactgagccctgtgaccacatcacgatatcaaggaggtgcacatcgtggctaaaaaagtagataaagttgttaaattacaaattcctgcaggtaaagcgaatccagcaccaccagttggtccagcattaggtcaagcaggtgtgaacatcatgggattctgtaaagagttcaatgcacgtactcaagatcaagcaggtttaattattccggtagaaatcagtgtttatgaagatcgttcatttacatttattacaaaaactccaccggctccagtattacttaaaaaagcagctggtattgaaaaaggttcaggtgaaccaaacaaaactaaagttgctacagtaactaaagatcaagtacgcgaaattgctaacagcaaaatgcaagacttaaacgctgctgacgaagaagcagctatgcgtattatcgaaggtactgcacgtagtatgggtatcgttgtagaataattttacgaatattaaatttgattacatgatttaaacgatgaagcagataacagagataataatgatgaattataaatataatctgaatgactagattaatgattgatttattcataagattaattcttctgttgtctgctcttaacttgcatctagcaagtaatgtgggaggaaattccgctaaaaccactaaaggaggaactataaatggctaaaaaaggtaaaaagtatcaagaagcagctagtaaagttgaccgtactcagcactacagtgttgaagaagcaattaaattagctaaagaaacaagcattgctaactttgacgcttctgttgaagttgcattccgtttaggaattgatacacgtaaaaatgaccaacaaatccgtggtgcagttgtattaccaaacggaactggtaaatcacaaagtgtattagtattcgctaaaggtgacaaaattgctgaagctgaagcagcaggtgctgactatgtaggtgaagcagaatacgttcaaaaaatccaacaaggttggttcgacttcgatgtagtagttgctacaccagatatgatgggtgaagttggtaaattaggtcgtgtattaggaccaaaaggtttaatgccaaaccctaaaactggaactgtaacaatggatgttaaaaaagctgttgaagaaatcaaagctggtaaagtagaataccgtgctgaaaaagctggtatcgtacatgcatcaattggtaaagtttcatttactgatgaacaattaattgaaaacttcaatactttacaagatgtattagctaaagctaaaccatcatctgctaaaggtacatacttcaaatctgttgctgtaactacaacaatgggtcctggagttaaaattgatactgcaagtttcaaataataaatgatataaacaattacaggctgaaagaaatatctttcagtctgtaaaaatatattgacaatgagtaatttccaagttatattacttattgtgattattttacctaagacagtaggagttatttataacttaaaacttatcctgccgaggctaaaattgacttgaacgtgatgatctatgatctttcaagcactttttgccgtgggtagaaagtgctttttttattaattttaaaaaaagcaccaaaaatttaaatggaggtgtctgaatgtctgctatcattgaagctaaaaaacaactagttgatgaaattgctgaggtactatcaaattcagtttcaacagtaatcgttgactaccgtggattaacagtagctgaagttactgacttacgttcacaattacgtgaagctggtgttgagtataaagtatacaaaaacactatggtacgtcgtgcagctgaaaaagctggtatcgaaggcttagatgaattcttaacaggtcctactgctattgcaacttcaagcgaagatgctgtagctgcagcgaaagtaatttctggatttgctaaagatcatgaagcattagaaattaaatcaggcgttatggaaggcaatgttattacagcagaagaagttaaaactgttggttcattaccttcacacgatggtcttgtatctatgcttttatcagtattacaagctcctgtacgcaacttcgcttatgcggttaaagctattggagaacaaaaagaagaaaacgctgaataatttttagcgtaaaaaaattaaaaataatggaggaattataaaatggctaatcatgaacaaatcattgaagcgattaaagaaatgtcagtattagaattaaacgacttagtaaaagcaattgaagaagaatttggtgtaactgcagctgctccagtagcagtagcaggtgcagctggtggcgctgatgctgcagcagaaaaaactgaatttgacgttgagttaacttcagctggttcatctaaaatcaaagttgttaaagctgttaaagaagcaactggtttaggattaaaagatgctaaagaattagtagacggagctcctaaagtaatcaaagaagctttacctaaagaagaagctgaaaaacttaaagaacaattagaagaagttggagctactgtagaattaaaataattcaagtatcttaaacttaataatcaaagttttatagcaagtattgctataatataatgattctttgagaagttaaaaccccgttattttgataacggggttttattcatttaaagactgagtgaaatgttataattataatgacgagttacaaagtgaagatgaggtggaataatgagtcattattatgatgaagatccaagtgtaattagcaatgaacaacgtattcaatatcaattaaaacatcataaaattgatttaataactgataacggagtgttttcgaaagataaagtagattatggttcagatgttcttgttcaaacttttttaaaaacgcatccacctggtccaagtaagcgaattgccgatgttggttgtggttacggaccaattggtttgatgattgctaaagtatcaccacatcattcaattacaatgctagatgttaataacagagcgctagccttagttgaaaaaaacaaaaaattaaacggtattgataatgtgatcgtaaaggaaagtgatgctttgtctgctgtggaagacaaaagttttgactttattttaaccaatccaccaataagagcagggaaagaaactgtgcatcgtatattcgagcaagcattacatagattagactcgaacggtgaactattcgttgtaattcagaagaagcaaggtatgccatctgcaaagaaaagaatgaatgaactttttggaaatgtagaagtggtaaataaagataaaggatattacattctgagaagtataaaagcttgaaatgaaatggatattctgttatagttatataatgtaaaaatttatgttcaataagtgtgtacttttacgttaaatagataagttaattaagaataaatatagaatcgaaaatggtgtcatcattagtgttgccgttttctttttgtctttttattaatatgcttatggtatttagctaaaagcggatcacataatttttgaggggtgaatctgtttggcaggtcaagttgtccaatatggaagacatcgtaaacgtagaaactacgcgagaatttcagaagtattagaattaccaaacttaatagaaattcaaactaaatcttacgagtggttcctaagagaaggtttaatcgaaatgtttagagacatttctccaattgaagattttactggtaatttgtcattagagtttgtggattaccgtttaggagaaccaaaatatgatttagaagaatctaaaaaccgtgacgctacttatgctgcacctcttcgtgtaaaagtgcgtctaatcattaaagaaacaggagaagttaaagaacaagaagtctttatgggtgatttcccattaatgactgatacaggtacgttcgttatcaatggtgcagaacgtgtaatcgtatctcaattagttcgttcaccatccgtttatttcaatgaaaaaatcgacaaaaatggtcgtgaaaactatgatgcaacaattattccaaaccgtggtgcatggttagaatatgaaacagatgctaaagatgttgtatacgtgcgtattgatagaacacgtaaactaccattaacagtattgttacgtgcattaggtttctcaagtgaccaagaaattgttgaccttttaggtgacaatgaatatttacgtaatactttagagaaagacggcactgaaaacactgaacaagcgttattagaaatctatgaacgtttacgtccaggtgaaccaccaactgttgaaaatgctaaaagtctattgtattcacgtttctttgatccaaaacgctatgacttagcaagcgtgggtcgttataaaacaaacaaaaaattacatttaaaacatcgtttattcaatcaaaaattagctgagccaattgtgaatactgagactggtgaaattgtagttgaagaaggtacagtgcttgatcgtcgtaaaatcgacgaaatcatggatgtacttgaatcaaacgcaaacagcgaagtgtttgaattgcatggtagcgttatagacgagccagtagaaattcaatcaattaaagtatatgttcctaacgatgatgaaggtcgtacgacaactgtaattggtaatgctttccctgactcagaagttaaatgtattacaccagcagatatcattgcttcaatgagttacttctttaacttattaagcggtattggatatacagatgatattgaccatttaggtaaccgtcgtttacgttctgtaggtgaattactacaaaaccaattccgtatcggtttatcaagaatggaaagagttgtacgtgaaagaatgtcaattcaagatactgagtctatcacacctcaacaattaattaatattcgacctgttattgcatctattaaagaattctttggtagctctcaattatcacaattcatggaccaagcaaatccattagctgagttaacgcataaacgtcgtctatcagcattaggacctggtggtttaacacgtgaacgtgctcaaatggaagtacgtgacgttcactactctcactatggccgtatgtgtccaattgaaacacctgagggaccaaacattggattgattaactcattatcaagttatgcacgtgtaaatgaattcggctttattgaaacaccatatcgtaaagttgatttagatacacatgctatcactgatcaaattgactatttaacagctgacgaagaagatagctatgttgtagcacaagcaaactctaaattagatgaaaatggtcgtttcatggatgatgaagttgtatgtcgtttccgtggtaacaatacagttatggctaaagaaaaaatggattatatggatgtatcgccgaaacaagttgtttcagcagcgacagcatgtattccattcttagaaaatgatgactcaaaccgtgcattgatgggtgcgaacatgcaacgtcaagcagtgcctttgatgaatccagaagcaccatttgttggtacaggtatggagcacgttgcagcacgtgattctggtgcagctattacagctaagcacagaggtcgtgttgaacatgttgaatctaatgaaattcttgtacgtcgtctagttgaagagaacggcgttgagcatgaaggtgaattagatcgctatccattagctaaatttaaacgttcaaactcaggtacatgttacaaccaacgtcctatcgttgcagttggagatgttgttgagtataacgagattttagcagatggaccatctatggaattaggagaaatggcattaggtagaaacgtagtagttggtttcatgacttgggacggttataactatgaggatgccgttatcatgagtgaaagacttgtgaaagatgacgtgtatacttctattcatattgaagagtatgaatcagaagcacgtgatactaagttaggacctgaagaaatcacaagagatattcctaatgtttctgaaagtgcacttaagaacttagacgatcgtggtatcgtttatattggtgcagaagtaaaagatggagatattttagttggtaaagtaacgcctaaaggtgtaactgagttaactgccgaagaaagattgttacatgcaatctttggtgaaaaagcacgtgaagttagagatacttcattacgtgtacctcacggcgctggcggtatcgttcttgatgtaaaagtattcaatcgtgaagaaggcgacgatacattatcacctggtgtaaaccaattagtacgtgtatatatcgttcaaaaacgtaaaattcatgttggtgataagatgtgtggtcgacatggtaacaaaggtgtcatttctaagattgttcctgaagaagatatgccttacttaccagatggacgtccgattgatatcatgttaaaccctcttggtgtaccatctcgtatgaacatcggacaagtattagagctacacttaggtatggctgctaaaaatcttggtattcacgttgcatcaccagtatttgacggtgcaaacgatgacgatgtatggtcaacaattgaagaagctggtatggctcgtgatggtaaaactgtactttatgatggacgtacaggtgaaccattcgataaccgtatttcagtaggtgtaatgtacatgttgaaacttgcgcacatggttgatgataaattacatgcgcgttcaactggaccatattcacttgttacacaacaaccacttggcggtaaagcgcaattcggtggacaacgtttcggtgagatggaggtatgggcacttgaagcatatggtgctgcatacacattacaagaaatcttaacttacaaatccgatgatacagtaggacgtgtgaaaacatacgaggctattgttaaaggtgaaaacatctctagaccaagtgttccagaatcattccgagtattgatgaaagaattacaaagtttaggtttagatgtaaaagttatggatgagcaagataatgaaatcgaaatgacagacgttgatgacgatgatgttgtagaacgcaaagtagatttacaacaaaatgatgctcctgaaacacaaaaagaagttactgattaatacgcaatttacaaaacaggcaaaaagatactaagctgaattttattgatgattcagtttagtactttaagccattttaaataaatgcaaatcaatcaaatagcacagctaatctaaattgaaggaggtaggctccttgattgatgtaaataatttccattatatgaaaataggattggcttcacctgaaaaaatccgttcttggtcttttggtgaagttaaaaaacctgaaacaatcaactaccgtacattaaaacctgaaaaagatggtctattctgtgaaagaattttcggacctacaaaagactgggaatgtagttgtggtaaatacaaacgtgttcgctacaaaggcatggtctgtgacagatgtggagttgaagtaactaaatctaaagtacgtcgtgaaagaatgggacacattgaacttgctgctccagtttctcacatttggtatttcaaaggtataccaagtcgtatgggattattacttgacatgtcaccaagagcattagaagaagttatttactttgcttcttatgttgttgtagatccaggtccaactggtttagaaaagaaaactttattatctgaagctgaattcagagattattatgataaatacccaggtcaattcgttgcaaaaatgggtgcagaaggtattaaagatttacttgaagagattgatcttgacgaagaacttaaattgttacgcgatgagttggaatcagctactggtcaaagacttactcgtgcaattaaacgtttagaagttgttgaatcattccgtaattcaggtaacaaaccttcatggatgattttagatgtacttccaatcatcccaccagaaattcgtccaatggttcaattagatggtggacgatttgcaacaagtgacttaaacgatttataccgtcgtgtaattaatcgaaacaatcgtttgaaacgtttattagatttaggtgcacctggtatcatcgttcaaaacgaaaaacgtatgttacaagaagccgttgacgctttaattgataatggtcgtcgtggtcgtccagttactggcccaggtaaccgtccattaaaatctttatctcatatgttaaaaggtaaacaaggtcgtttccgtcaaaacttacttggtaaacgtgttgactattcaggacgttcagttatcgcggtaggtccaagcttgaaaatgtaccaatgtggtttaccaaaagaaatggcacttgaactgtttaaaccattcgtaatgaaagaattagttcaacgtgaaattgcaactaacattaaaaatgcgaagagtaaaatcgaacgcatggatgatgaagtttgggacgtattggaagaagtaattagagaacatcctgtattacttaaccgtgcaccaacacttcatagacttggtattcaagcatttgaaccaactttagttgaaggtcgtgcgattcgtctacatccacttgtaacaacagcttataacgctgactttgatggtgaccaaatggcggttcacgttcctttatcaaaagaggcacaagctgaagcaagaatgttgatgttagcagcacaaaacatcttgaaccctaaagatggtaaaccagtagttacaccatcacaagatatggtacttggtaactattaccttactttagaaagaaaagatgcagtaaatacaggcgcaatctttaataatacaaatgaagtattaaaagcatatgcaaatggctttgtacatttacacacaagaattggtgtacatgcaagttcattcaacaatccaacatttactgaagaacaaaacaaaaagattcttgctacgtcagtaggtaaaattatattcaatgaaatcattccagattcttttgcttatattaatgaacctacgcaagaaaacttagaaagaaagacaccaaacagatacttcatcgatcctacaactttaggtgaaggtggattaaaagaatactttgaaaatgaagaattaattgaacctttcaacaaaaaattcttaggtaatattattgcagaagtattcaacagatttagcatcactgatacatcaatgatgttagaccgtatgaaagacttaggattcaaattctcatctaaagctggtattacagtaggtgttgctgatatcgtagtattacctgataagcaacaaatacttgatgagcatgaaaaattagtcgacagaattacaaaacaattcaatcgtggtttaatcactgaagaagaaagatataatgcagttgttgaaatttggacagatgcaaaagatcaaattcaaggtgaattgatgcaatcacttgataaaactaacccaatcttcatgatgagtgattcaggtgcccgtggtaacgcatctaactttacacagttagcaggtatgcgtggattgatggccgcaccatctggtaagattatcgaattaccaatcacatcttcattccgtgaaggtttaacagtacttgaatacttcatctcaactcacggtgcacgtaaaggtcttgccgatacagcacttaaaacagctgactcaggatatcttactcgtcgtcttgttgacgtggcacaagatgttattgttcgtgaagaagactgtggtactgatagaggtttattagtttctgatattaaagaaggtacagaaatgattgaaccatttatcgaacgtattgaaggtcgttattctaaagaaacaattcgtcatcctgaaactgatgaagttatcattcgtcctgatgaattaattacacctgaaattgctaagaaaattacagatgctggtattgaacaaatgtatattcgctcagcatttacttgtaacgcacgacatggtgtttgtgaaaaatgttacggtaaaaaccttgctactggtgaaaaagttgaagttggtgaagcagttggtacaattgcagcccaatctatcggtgaaccaggtacacagcttacaatgcgtacattccatacaggtggggtagcaggtagcgatatcacacaaggtcttcctcgtattcaagagattttcgaagcacgtaaccctaaaggtcaagcggtaattacggaaatcgaaggtgtcgtagaagatattaaattagcaaaagatagacaacaagaaattgttgttaaaggtgctaatgaaacaagatcataccttgcttcaggtacttcaagaattattgtagaaatcggtcaaccagtacaacgtggtgaagtattaactgaaggttctattgaacctaagaattacttatctgttgctggattaaacgcgactgaaagctacttattaaaagaagtacaaaaagtttaccgtatgcaaggggtagaaatcgacgataaacacgttgaggttatggttcgacaaatgttacgtaaagttagaattatcgaagcaggtgatacgaagttattaccaggttcattagttgatattcataactttacagatgcaaatagagaagcatttaaacaccgtaagcgccctgcaacagctaaaccagtattacttggtataactaaagcatcacttgaaacagaaagtttcttatctgcagcatcattccaagaaacaacaagagttcttacagatgcagcaattaaaggtaagcgtgatgacttattaggtcttaaagaaaacgtaattattggtaagttaattccagctggtactggtatgagacgttatagcgacgtaaaatacgaaaaaacagctaaaccagttgcagaagttgaatctcaaactgaagtaacggaataacaagtatataacagaggctaaggctttagcctcttgttatttttatgtaaattatttgatttaatgttgacgaattctcttgttcaatgttaatatattaaaggttgatgcaagcagaactttggaggataaattattgtctaaggaaaaagttgcacgctttaacaaacaacattttgtagttggtcttaaagaaacgcttaaagcgttaaagaaagatcaagttacatctttgattattgctgaagacgttgaagtatatttaatgactcgcgtgttaagccaaatcaatcagaaaaatatacctgtatctttttttaaaagcaaacatgctttgggtaaacatgtaggtattaacgtcaatgcgacaatagtagcattgattaaatgagaattagtaagtgttttacttactaaattttatttaacctaaaaatgaaccacctggatgtgtgggattaaaaagtgaagagaggaggacatatcacatgccaactattaaccaattagtacgtaaaccaagacaaagcaaaatcaaaaaatcagattctccagctttaaataaaggtttcaacagtaaaaagaaaaaatttactgacttaaactcaccacaaaaacgtggtgtatgtactcgtgtaggtacaatgacacctaaaaaacctaactcagcgttacgtaaatatgcacgtgtgcgtttatcaaacaacatcgaaattaacgcatacatccctggtatcggacataacttacaagaacacagtgttgtacttgtacgtggtggacgtgtaaaagacttaccaggtgtgcgttaccatattgtacgtggagcacttgatacttcaggtgttgacggacgtagacaaggtcgttcattatacggaactaagaaacctaaaaactaagaatttagtttttaattaaatcttaaacttaaaatatttaatataaggaagggaggatttacattatgcctcgtaaaggatcagtacctaaaagagacgtattaccagatccaattcataactctaagttagtaactaaattaattaacaaaattatgttagatggtaaacgtggaacagcacaaagaattctttattcagcattcgacctagttgaacaacgcagtggtcgtgatgcattagaagtattcgaagaagcaatcaacaacattatgccagtattagaagttaaagctcgtcgtgtaggtggttctaactatcaagtacctgtagaagttcgtccagagcgtcgtactactttaggtttgcgttggttagttaactatgcacgtcttcgtggtgaaaaaacgatggaagatcgtttagctaacgaaattttagatgcagcaaataatacaggtggtgccgttaagaaacgtgaggacactcacaaaatggctgaagcaaacaaagcatttgctcactaccgttggtaagataaaagcttttaccctgagtgtgttctatattaatgaattttcattaagcgttcatgcttagggcatcgccatatctatcgtatttattcagtaatataaactggaaggagaaaaaatacatggctagagaattttcattagaaaaaactcgtaatatcggtatcatggctcacattgatgctggtaaaacgactacgactgaacgtattctttattacactggccgtatccacaaaattggtgaaacacacgaaggtgcttcacaaatggactggatggagcaagaacaagaccgtggtattactatcacatctgctgcaacaacagcagcttgggaaggtcaccgtgtaaacattatcgatacacctggacacgtagacttcactgtagaagttgaacgttcattacgtgtacttgacggagcagttacagtacttgatgcacaatcaggtgttgaacctcaaactgaaacagtttggcgtcaggctacaacttatggtgttccacgtatcgtatttgtaaacaaaatggacaaattaggtgctaacttcgaatactctgtaagtacattacatgatcgtttacaagctaacgctgctccaatccaattaccaattggtgcggaagacgaattcgaagcaatcattgacttagttgaaatgaaatgtttcaaatatacaaatgatttaggtactgaaattgaagaaattgaaattcctgaagaccacttagatagagctgaagaagctcgtgctagcttaatcgaagcagttgcagaaactagcgacgaattaatggaaaaatatcttggtgacgaagaaatttcagtttctgaattaaaagaagctatccgccaagctactactaacgtagaattctacccagtactttgtggtacagctttcaaaaacaaaggtgttcaattaatgcttgacgctgtaattgattacttaccttcaccactagacgttaaaccaattattggtcaccgtgctagcaaccctgaagaagaagtaatcgcgaaagcagacgattcagctgaattcgctgcattagcgttcaaagttatgactgacccttatgttggtaaattaacattcttccgtgtgtactcaggtacaatgacatctggttcatacgttaagaactctactaaaggtaaacgtgaacgtgtaggtcgtttattacaaatgcacgctaactcacgtcaagaaatcgatactgtatactctggagatatcgctgctgcggtaggtcttaaagatacaggtactggtgatactttatgtggtgagaaaaatgacattatcttggaatcaatggaattcccagagccagttattcacttatcagtagagccaaaatctaaagctgaccaagataaaatgactcaagctttagttaaattacaagaagaagacccaacattccatgcacacactgacgaagaaactggacaagttatcatcggtggtatgggtgagcttcacttagacatcttagtagaccgtatgaagaaagaattcaacgttgaatgtaacgtaggtgctccaatggtttcatatcgtgaaacatttaaatcatctgcacaagttcaaggtaaattctctcgtcaatctggtggtcgtggtcaatacggtgatgttcacattgaattcacaccaaacgaaacaggcgcaggtttcgaattcgaaaacgctatcgttggtggtgtagttcctcgtgaatacattccatcagtagaagctggtcttaaagatgctatggaaaatggtgtcttagcaggttatccattaattgatgttaaagctaaattatatgatggttcataccatgatgtcgattcatctgaaatggccttcaaaattgctgcatcattagcacttaaagaagctgctaaaaaatgtgatcctgtaatcttagaaccaatgatgaaagtaactattgaaatgcctgaagagtacatgggtgatatcatgggtgacgtaacatctcgtcgtggacgtgttgatggtatggaacctcgtggtaatgcacaagttgttaatgcttatgtaccactttcagaaatgttcggttatgcaacatcattacgttcaaacactcaaggtcgcggtacttacactatgtacttcgatcactatgctgaagttccaaaatcaatcgctgaagatattatcaagaaaaataaaggtgaataatataacttgttttgactagctagcctaggttaaaatacaaggtgagcttaaatgtaagctatcatctttatagtttgattttttggggtgaatgcattataaaagaattgtaaaattctttttgcatcgctataaataatttctcatgatggtgagaaactatcatgagagataaatttaaatattatttttaattagaataggagagattttataatggcaaaagaaaaatttgatcgttctaaagaacatgccaatatcggtactatcggtcacgttgaccatggtaaaacaacattaacagcagcaatcgctactgtattagcaaaaaatggtgactcagttgcacaatcatatgacatgattgacaacgctccagaagaaaaagaacgtggtatcacaatcaatacttctcacattgagtaccaaactgacaaacgtcactacgctcacgttgactgcccaggacacgctgactacgttaaaaacatgatcactggtgctgctcaaatggacggcggtatcttagtagtatctgctgctgacggtccaatgccacaaactcgtgaacacattcttttatcacgtaacgttggtgtaccagcattagtagtattcttaaacaaagttgacatggttgacgatgaagaactattagaattagtagaaatggaagttcgtgacttattaagcgaatatgacttcccaggtgacgatgtacctgtaatcgctggttcagcattaaaagctttagaaggcgatgctcaatacgaagaaaaaatcttagaattaatggaagctgtagatacttacattccaactccagaacgtgattctgacaaaccattcatgatgccagttgaggacgtattctcaatcactggtcgtggtactgttgctacaggccgtgttgaacgtggtcaaatcaaagttggtgaagaagttgaaatcatcggtttacatgacacatctaaaacaactgttacaggtgttgaaatgttccgtaaattattagactacgctgaagctggtgacaacattggtgcattattacgtggtgttgctcgtgaagacgtacaacgtggtcaagtattagctgctcctggttcaattacaccacatactgaattcaaagcagaagtatacgtattatcaaaagacgaaggtggacgtcacactccattcttctcaaactatcgtccacaattctatttccgtactactgacgtaactggtgttgttcacttaccagaaggtactgaaatggtaatgcctggtgataacgttgaaatgacagtagaattaattgctccaatcgcgattgaagacggtactcgtttctcaatccgtgaaggtggacgtactgtaggatcaggcgttgttactgaaatcattaaataatttctaatttcttagattttatataaaaagaagatccctcaatcgaggggtctttttttaatgtgtaaattttgtcatggctattcgatttagaagaacaataattgttgaaagattgactaataaaacttataactgataatacagtttaaataaaattattgagctttggacattgtaaaatgctcctctcaaagttttcattttttcaatgtctactttgaagggagcatttcattagtttatgtctcagattcatgtctttcaattaatataaatgcttaatttgttttaaatacttgctctaattcaatgatttttaaaaatacagctacagcgtattttaatgatttttcaccaatatcaaatttgggattatggtgtggcgctgtaatacctttactttcattaccacaaccagtcagaaagaatgcacctggtcgtactttcaaataatgtgaaaaatcttctccaatcatcattaaatctgattcattaaagcgtacatgtatgtcatttgttgcttctttaataacttgatatgctttctcgttgttatggacaggcaaataccctttaatataattcaaatcgtagttaatatcatttgctattgctaaaccttgtagtagcttatccattttgtccattacatgattctgtatatctgaatcgaaagttctaactgtacctttacaaaatgcttgttcaggaataacgctatctgtggtgcctgcttgaatcattccaaatgaaagtacagcttgtttaactggatcgattgtacgtgaaattattttttgtgcgcttaaaatgaactctgccatgatcactattgggtcaatggtttcatgaggtttggcaccatgaccgccacgacctttaattgtgacactgaattcatctggagaggccatgattgccccagcacgtgaatgaatagttccagtaggataaccactccataaatgtgtaccgtaaattctatctacattttccaggcatccagcatctatcatttcttgagaaccacctggcatgatttcttcaccgtactggaatattaatacaacattaccttctaataaatgtttatgttcatctaaaatctctgctacagtaagtaaaattgctgtatgaccatcatgcccacacgcatgcatacatcctggatttttagacttataaggcacatcgtttaattcctcgacaggtaacgcatcaaagtcagctcttaatgcaatggtaggtcctgtgcccaagcctttaaatgtggctttgataccattgcggccgataggtgtttcaatatcacaagataactggcttaattggttaacaatataatcatgtgtttgaaattcttcaaaagataactcaggatattggtgtaaataacgtctgagttgaattgttttattttctttattatttgctagttggaaccaatctaacacccttatcactactttctaaaataatgtttatagtataacattttatgaaattatcgtactaaatgattgctttgagatattttatctatgaatgataaggctttcaagttatgtagaattactgtatgataaaggtattaccaaacaatacttaagggggattatacactgtggttcaatcattacatgagtttttagaggaaaatataaattatctaaaagaaaatggtttgtataatgaaatagatacaattgaaggtgcaaacggaccagaaatcaaaatcaatgggaaatcatacattaacttatcttcaaataattatttaggactagcaacaaatgaagatttgaaattagctgcaaaagcagctattgatacacatggtgtaggtgcaggcgctgttcgtacaatcaatggtacattagatttacacgacgaattagaacaaacactagcaaaatttaaaggaacagaagctgcaatagcttatcaatcaggatttaattgtaatatggctgctatttcggctgttatgaataaaaatgatgctattttatcagatgagcttaatcatgcatcaattattgatggatgtcgcttatctaaagctaaaattattcgagttaaccattcagacatggatgatttacgtgcgaaagcaaaagaagcagttgaatcaggtcaatacaataaagtgatgtatatcactgatggcgtttttagtatggatggtgatgtggctaaattacctgaaattgtagaaattgcagaagaatttggtttattaacttatgttgacgacgctcatggttcaggtgttatgggtaaaggcgctggtacggttaaacattttggtttacaagataaaatcgatttccaaataggtacgctttctaaagcaattggtgtcgttggcggttatgtagcaggtacaaaagagttaatagattggttaaaagcacaatcacgaccattcttattctctacatcattagcacctggggatactaaagcgataactgaagcagttaaaaagttaatggcttcaactgaattacatgataaattatgggacaatgcacaatatttaaaaaacggattgtcaaaattaggatatgatacaggtgagtcagaaactccaattacaccagtaattattggtgatgaaaaaacaactcaagaatttagtaagcgtttaaaagacgaaggtgtctatgtgaaatctatcgttttcccaacagtaccaagaggtacaggacgtgtaagaaatatgcctacagctgcacatacaaaagacatgttagatgaagcaattgcggcttatgaaaaagtaggaaaagaaatgaagttgatttaaaatttatttattcccacggcaaatattgtcgtgggctttttttaaatgtttagtttattaacagtaagttcttataacaatgtttagtgttatcaaccactaaagtttgaattttaaaagcatcttatagaatttagttgtatttttacaaagaaattcattctgattatttttgataatgagcattttaatggtaatacatgtttatagtgtgtagtatatgtctatactagtagtaactatatagagaaagtaggaataaactatgtcacaagatgtaaatgaattaagtaagcaaccaacgccagataaagcagaagataatgcatttttcccatcaccatattcccttagtcaatatacagcacctaaaacagattttgatggtgttgaacacaaaggtgcctataaagatggtaaatggaaagtattgatgattgctgctgaagagagatacgtattattggaaaatggaaaaatgttctctacgggtaatcatcctgttgaaatgttattacctttacatcatttaatggaagcaggttttgacgttgatgttgcgacattatctggttatccagctaaattagaattatgggctatgccaactgaagacgaggcagttataagcacttataataaattgaaagaaaaattaaaacagccaaaaaaattagcagatgtgattaaaaatgaattaggacctgattcagactatttatctgtctttatcccaggtggacatgctgcagttgttggtatttctgaaagcgaagacgttcaacaaacattagattgggcattagaaaatgaccgctttatagttacattatgtcatggaccagcagcactactttcagcagggcttaacagagaaaaatctccattagaaggatactctgtttgtgtcttccctgactcattagatgaaggtgcaaatattgaaataggttatttacctggacgcttgaaatggttagttgctgatttattaactaaacaaggattaaaagtagtcaacgacgatatgacaggaagaacgttaaaagatcgcaaattattaacaggtgacagtcctttagcttcaaatgagttaggaaaattagcagttaatgaaatgttaaatgcaatacaaaataaataattaaatataaattagaggagccccatatgtaaatgtatgagggctcttttttttggcaaaatttaagtgatacttgtaaaatagaacctattatgagtatgatttaagaaagcgcttgcaaaaataataaccgcaactagcgatatggaggaaacatgatgtcttatagcattggaattgattatggaactgcttcaggccgtgtgtttttaattaatacaactaacggtcaagtagtatcaaaatttgtgaaaccatatacacatggtgtcattgagagtgaattaaatggtttaaaaataccacatacatatgcacttcaaaatagtaatgattatttagaaattatggaagaaggaatatcatatatagtacgtgaatcaaaaatagatccagtcaatatagtaggtattggtatagactttacttcatctactattgtttttactgacgaaaaccttaacccggtacataatttaaaacaatttaaaaacaatccacatgcgtatgtgaaactttggaaacatcatggtgcatataaagaagcagagaaattatatcaaactgctattgaaaataataataagtggttaggccattatggatataatgttagtagtgaatggatgattcccaaaataatggaggtcatgaatagagcaccagaaattatggaaaaaacggcttatattatggaagcgggcgattggattgtaaataaattaactaataaaaatgtacgctcgaattgtggattaggtttcaaagcattttgggaagaagaaacagggtttcattatgatttatttgataaaatagaccccaaattatcaaaagtaattcaagataaagtatctgcaccggttgttaatattggtgaagcagtagggaaactggacgataaaatggcacagaaattaggattatcaaaagagactatggtaagtccttttattattgatgcccatgctagtttattaggtattgggtctgaaaaagataaagaaatgactatggtgatgggaacaagcacatgccatcttatgttaaatgaaaagcaacatcaagtgccaggtatatcaggttcagtaaaaggagcaatcattccagaattatttgcttatgaagcgggacaatcagcagtaggtgatttgtttgagtatgtcgctaagcaagcaccaaagtcatatgtagatgaagcagcaaatagaaatatgactgtatttgaattaatgaatgaaaagataaaacatcaaatgccaggtgaaagtgggctcattgctctcgattggcataatggaaatcgaagtgtattaagtgatagcaatttaacaggttgtatctttggattaactttacaaactaagcatgaggatatttatagagcatatttagaagctacagcatttggtactaagatgattatgcaacagtatcaagattggcatatggaagtagaaaaagtatttgcatgtggcggtatacctaaaaagaatgctgttatgatggatatctatgcgaatgtactgaataaaaaactaattgttatggatagtgagtatgcaccagcaataggcgcagcaatattaggtgcagtcagtggtggcgcacataattcaattaatgacgcagttgatgctatgaaagagccaattttatacgaaattaatccagaagcggaaaaagtacaaaggtatgaaacattatttaaagcttataaggctttacatgatatccatggttataaaaaagctaatataatgaaagatatccaaaggttaagagttgagggataaaaaatttaatttgacagtaattagtaatattcaacgctataaattactaaaatcaattaatacagctagaattttcatttacagaaatatcagcaacatgtacatgtcatatatacaagaaagcgcttttatattataattattatgaaaatgaatattatgtccgcttgtgatggactatggttatatggaagagacaaaggagatatttctatgaaaaaaattatgattactggtgcattaggacaaattggtacagaattagttgttaagtgcagagagatttatgggacagataatgttcttgctacagatattagggaacctgaagcagactcacctgtacaaaatggaccatttgaaatcttagacgtaacagatcgtgaccgcatgtttgagttagttagggactttgaagcggatagtctaatgcatatggcagcattattatcagcaactgctgagaaaaatccaattcttgcttgggatttaaatatgggtggattaatgaatgcattagaagctgcaagaacttataatttgcactttttcacaccaagttcaattggtgcatttggagactcaactcctaaagttaatacgccacaagtaacgattcagcaacctacgacaatgtatggtgtaaataaagtagctggagaattattgtgtcaatactatttcaaacgttttggtgtagatacaagaagtgttagattcccaggtttaatctcgcatgttaaagagccaggtggtggtactacagactatgctgttgaaatatacttcaaagcagtaagagaaggtcattatacaagcttcatagataaaggcacgtatatggatatgatgtatatggatgatgcaattgaagcaattattaagcttatggaagcagacgacgctaaattagaaactagaaatggttataatttgagcgcaatgagttttgatccagagatggtaaaagaagcaattcaagaatactatccaaattttacattagattatgatattgatcctattagacaaggtatcgctaatagttggccggattctattgatacaagctgttcacgtggcgaatggggatttgatcctaaatatgatttagcgagcatgactaaattaatgttagaagctattgaacaaaaagatactgttaaaaataataactaatcatttccattcactttaatacacggaatgatattttaaattactctttattttaataaactagtgcatgaattctaagattattcattatacatattgaattcgcgagcttagttcattttaaagtaaagagtttttttgtatgtaaagtatattagtaaaacacagattacttgtctccgtgaaattaatacgtttatactaaaagatatagtctttctagaaaatctgttaattaattttgaatttttagaaaatttattgaacagcaaaatatggattgttataatttaagttaaacaaattcttatacaatattattaggaggcaatcaccatgtcacaagcagttaaagttgaacgacgagaaacattaaaacaaaaaccaaatacatctcaactaggttttggtaaatattttactgattatatgttgagttatgattatgatgcagataaaggatggcatgatttgaagatagtaccttatggtcctattgaaatttcacctgctgcacaaggtgttcattatggtcaatcggtattcgaaggattaaaagcatataaaagagatggggaagttgcacttttccgtcctgaagaaaattttaagcgtcttaataactcgttagcacgattagaaatgcctcaagtagacgaagcagaattgttagaggggctaaaacaattagttgatatagagagagattggattcctgaaggggaaggtcaatcattatatattcgtccatttgtttttgcaacagaaggggcacttggcgttggtgcatcacatcagtataaattattaattattttatctccttcaggtgcatattatggtggtgaaactttaaaaccaactaaaatctatgtagaagatgaatatgtgcgtgctgttcgtggcggtgtaggctttgcgaaagttgcaggtaactatgcggcaagtttattagcacaaactaatgcaaataaattaggttatgaccaagtattatggcttgatggtgttgaacagaaatatatcgaagaagttggtagcatgaacattttcttcgttgaaaatggcaaagtaattacaccagagttgaatggcagtattttacctggtattacacgtaaatctatcatcgaattagctaaaaacttaggatatgaagtcgaagagcgccgcgtttcaatcgatgaattattcgaatcatatgataaaggtgagttaacagaagtatttggtagtggtactgcagcagttatttcacctgtgggtacattgagatacgaagatcgtgaaatcgttattaataataatgagactggtgaaattactcaaaaattatacgacgtctatactggtattcaaaatggtactttagaagataaaaatggttggagagtcgttgtaccaaaatattaataaaaaattgaatatgatcatgaaaacaatatgtaaaagttaatcatgactaaaatccctttcaatgaagcgaagcatggtaataaattaagtttacaatgtttattgttaagtattgaaggggatttcacttattattatatttaattcaatatttaaaaagaacaatactacgagttcattttcagggaaataacgaacatcatagaatcagcataatacgaaataaataaataggagtattgatattaatggaatggatattatttgataaagatggtacgttaattgaatttgatagaagttgggaaaaaataggggtaagatttgtacaatcattgcttgagactttcccagtacataataaagaagctgctttaagacaactcggtgtcattaaagaatctattgatccaaaatcagtgatgggttcaggatctttacaacaaattattcaggcatttaatgatgtgacgggacaagatacaaccgactggtccaagtcaacaagtcaaaagttggtagatgaacgtattcctgaaattaattgggtagaaggtgttaaagaagcacttatcgatttgaaagcaaaaggctatcaactaggtattgttacgagtgatactaaaaaaggtgtagaacaatttttagcacataccaatgctacctcgttgttcgatttgatcatttctaccgaagcggatgcctatgagaagccaaatcctaaagtattatcgcctttatttgagaaatataatgtagatcctcagaaagtagctatagtaggagacactgctaatgatatgaagacagcaagtaatgcaaatttaggtatggcaataggtgtattaacaggtattgcaacaaaagaagaattacatgaagctgatattattttaaatagtgcggcagatattttagaagctttaaattaaaaagaaagacatagtgtatatgtgaattaatgtattcgatagaattgataaaataatcgatgatttctatggaagttacattgaattaaagcacatacactatgtctttagtcttttatcgtgtatctacttgtcgatacgtttttataatacgagcgattttatcaatcataggatttaaagaatcaggatctttgtgtatatcatattcattaatgttgatacgtacaactggacatgcattaaagctgttaatccaatcgtcataacgtttaaataactttttccaatattcaggatcagtatttatttccatttcgcgaccacgttcaataatacgatcaatgacctcgtcataattacattctaaataaatcattacatcaggtttaggaaaataaggtgtcatgaccatggcattaaataagtctgaatatgttttgaaatcttctttactcattgtgccttcttcttcatgcatttttgcaaaaatatcaacatcttcataaattgatcgatcttggacaaagccaccaccatattcaaacatacgcttttgttctttaaaacgttcagctaagaagtaaatttgcaaatggaaactccatcgttcaaaatcgctgtaaaatttatctaaatatggattatgttcgacattttcaaaagacgttttaaagtttaatttatctgcaagtgcttgcgttagtgttgattttccaacaccaactgtacctgcaatggttataatggcattttgtggaataccgtaattattcattggtaatatctcctatcataggtaatataatatgtaatatatcttcgtaatcttgttcattttttagaaaatcaatagaagttgtatcgattaaaactacatttgaaccattactttgtaaggactcataatactcacgataatctttttttaactttaacagatattcatcttctatttgatgctcaaaactacggttacgtttagcaattctagattttaacacatcaaggtctgcatctaaaaagataatcatattcggcataatcatatcttcagttaaaatatcataaattttactgaatttctgaaattcaacagaactcaaagtatttttagcaaatatcttatttttatgtatatgataatcactaactacaccttgatttagttgtgttacatcttgaaattgcttatatctattgcataaaaagaacatttcagtttgaaaactccatttagagatatcttcataaaagtctgataaaaatggattttctgtgatgatttctttttcttcataaaaatctaaagtttgacttaatttgtgtgcaagtgaagatttacctacgccaataggaccttcaattgctataaaaggtttgttcatattcacatctccaaatgttaaaatagacattgagtattgtaccataagtgaggtatctggacataaatgacaaatgatatatattttatgacattagcgattgaagaagctaaaaaagcagctcaactaggcgaagtacctataggtgctatcatcactaaagatgatgaagttatcgctagagcacataatttaagagaaacactacaacaaccaacggcccatgctgaacatattgcaattgaacgtgcagccaaagtgttaggtagttggcgtttagaaggttgcacattatatgtaaccttagaaccatgtgtcatgtgcgcaggaacaattgtaatgagtcgcattccaagagtcgtctatggcgcagatgatcctaaaggtggttgtagtggcagtttaatgaatttattgcaacaatctaattttaatcatcgtgcaattgttgataaaggtgtacttaaagaagtatgtagcacattattaacaacattttttaaaaacttaagagccaataagaaatccaccaattagacgatagtacatactaattaaaatttgttagaattacattatatgataaattaatgacaatataaatgttaatagaaaagtatgtgcgctgagtatatattcttatttaagaacaagattttaaatttacgaaacgaggtaacataatgataaaactaatagccactgatatggatggcacgctacttaatgcagcacatgaaatttctcaacctaatattgatgcgattaaatacgctcaagaacaagggataacggttgttatcgcgacaggtcgagcattttatgaagcacaagcaccagttgctgacacagatttaacagtaccatatatttgtttgaatggtgctgaagtacgtgatgaaactttcaatgtaatgagcacttcacaccttaataaatcgttagtacacaaaattacaaatgttttaaaagatgcaggtatttattatcaagtatacacgagtcgtgcgatttatactgaagatccacaaagagatttagacatttacatagatattgctgagcgtgcaggtcaacacgcaaacgttgagcgtattaaaaatggtattcaaagacgcatagataatggtacgttgaaagttgttgataattatgatgctattgaaaacatacctggtgaattaattatgaaaatattagcatttgatggaaatttagaaaaaattgacaaagctagtaaaattttagctgaatctccgaatttagctatatcatcatcttcgagaggaaatatagaaataacgcattcagatgcacaaaaaggtattgcgctagaaacaattgccgaaagattagagattgaaatgaaagatgtcatggcaataggtgacaatttaaatgacttatcaatgttagagaaagttggctatccagttgcgatggaaaatggtgcagaagaagttaaaaaaatagcgaaatatgtcacagatactaatgaaaatagtggtgttggtaaagctattatgaaattattacgtgaacaacaagtttaataaaaaagaggggtcaaatatgaaaggattaattattattggcagtgcacaagtgaattcacatacaagtgcactagcaagatacttaactgagcattttaaaacacatgatattgaagcggaaatattcgatttagcagaaaaaccgttaaatcaattagatttttcaggaacaacaccgtctattgatgaaatcaaacaaaatatgaaagatttaaaagagaaagcaatggcggcggactttttaatattaggaacgccaaactatcatggttcatattctggaatattgaaaaatgcattagatcatctaaatatggattattttaaaatgaaacctgtaggcttaataggaaatagtggtggtattgttagttcagagccattgtcacatttaagagtaatcgtcagaagtttactaggcattgctgtaccaactcaaatagcaacacatgattctgattttgctaaaaatgaagatggttcatattacttaaatgatagtgaattccaattacgagcaagattatttgtcgatcaaattgtatcttttgtgaataatagtccatatgaacatttaaaataatattaaaaaatatgtaaatatacattaaaaataggtatgtagcttaaggtatttcattgagaatgcttttaagtcacatgcctatttttttgttctaatgcaccaatagcaagcctttgagtttactgttgtgagcaatgttattaattaaaataagatgtaatagcgaaatgaaaacaagcttagattaaaagtaaggttaaaaaatatagataaataatttaaaacaatttaagaaaaaaagtattaaaaattgcaattcttaaactaaaatacatattaatatttactgcaaataacattgtaaaataaagaaaaataattaaagtattgcgctttatctaaatttgtattatgatagtaatgcagaaatttatatatgcaaaatattatatttatcaaattttgatattttaaaggagtattattaaatgaataataaaaagacagcaacaaatagaaaaggcatgataccaaatcgattaaacaaattttcgataagaaagtattctgtaggtactgcttcaattttagtggggacaacattgatttttgggttaagtggtcatgaagctaaagcagcagaacatacgaatggagaattaaatcaatcaaaaaatgaaacgacagctccaagtgagaataaagcaaccgaaaaagttgatagtcgtcaacaaaataatattgaacaaagtacaacgtcagaccaaccaaaagtaaatgagtctgataatacttcagttaaagaaactactgaagaacctcaaaatacaacttctacacaaccaactaaacaaaataacgatgcgacggcaaataaagataatttagcggctcaaaatatttcaacgcaggctaaaaatgtttcagctactcctaaaacaacgaatattaagccaagaacattaaaccgtatggctgtgaacacagtagcagcaccacaacaaggtacaaatgttaatgataaagttcatttttcaaatattgatattgctattgataaaggacatgtcaataaagatactggcaaaactgaattttgggcgacttctagtgatgttttaaaattaaaagcgaattacacaatcgatgattctgttaaagagggcgatacatttacatttaaatatggacagtatttccgtccgggttctgtaagattaccttcacaaactcaaaatttatataatgcccaaggtaatattattgcaaaaggtatttatgatagtaatacaaacacaacaacatatacttttacgaactatgtagatcaatatacaaatgttagcggtagcattgaacaagtcgcatttgcgaaacgtgaaaatgcaacaactgataaaactgcttataaaatggaagttacattaggaaacgataaatatagtaaagatgtcattgtcgattatggtaacaagaaagcacaaccgcttatttcaagtacaaactatatcaacaatgaagatttatcgcgtaatatgactgcatatgtaaatcaacctaaaaatacatatactaaacaaacgtttgttactaatttaactggatataaatttaatccaaatgcaaaaaacttcaaaatttacgaagtgacaaatcaaaatcaatttgtggatagtttcaccccagatacttcaaaacttacagatgttactaatcaatttaatattacttacagcaatgataataagactgcatcagttgatttaatgaatggtcaaacaagtagtaataaacaatacattattcaacaagttgcttatccagataatagttcaacagataatgggaaaattgattatactttagacactgacaaaactaaatatagttggtcaaacagttattcaaatgtgaatggctcatcaactgcaaatggcgaccaaaagaaatataatctaggtgactatgtatgggaagatacaaataaagatggtaaacaagatgccaatgaaaaagggattaaaggtgtttatgtcattcttaaagatagtaacggtaaagaattagatcgtactactactgatgaaaatggtaaatatcagttcacaggtttgggaaatgggacttacagtgtagaattttcaacgccagcaggttacacaccaaccactgcaaatgcaggaactgatgatgctgttgattcagatggtttaacaacaacaggtgtcattaaagatgcagataacatgacattagacagtggtttctataaaacaccaaaatacagtttaggtgattatgtttggtacgacagtaataaagacggcaaacaagattcaactgaaaaaggtatcaaagatgtgacagttacattgcaaaatgaaaaaggcgaagtaattggaacaactaaaacagatgaaaatggtaaatatccgctttcgataatttagatagcggtaaatactaaagttattctttgaaaagcctgctggcttaacacaaacaggtacaaatacaactgaagatgataaagatgcagatggtggcgaagttgacgtaacaattacggatcatgatgatttcacacttgataacggatacttcgaagaagatacatcagacagcgactcagattcagacagtgattcagactcagacagtgattcagactcagacagcgactcagattcagacagtgattcagactcagatagcgactcagattcagatagcgattcagattcagatagcgattcagattcagatagcgactcagactcagacagtgactcagactcagatagcgattcagatagcgactcagacagtgattcagactcagacaacgactcagactcagacagcgactcagattcagatagtgactcagactcagatgcaggtaaacatacaccggctaaaccaatgagtgcagttaaagaccatcacaataaagcgaaagcattaccggaaacaggtagtgaaaataataattcaaataatggcacattattcggtggattattcgcggcattaggatcattattactattcggtcgtcgtaaaaaacaaaataaataatatgattaatttaaccaggtctgtgtggcctggtttttctgtttagaaattcccagatataaaaccaaaaatctttaaggaatagatacaatttaatttgttacagaaatgtaattgtcaatgaattagaaaagctaagatattaattttaagggcaaataatactattttttatgataattaaataaagattacaaaattcataaaaacttttatttaactacaaatgttaaataacgttttgcgataaagaaaaataattaaagtattgtgctttatctaaaaatgtaatactatattgatatacatttttgtatttaaaacaattgtattatttaaaaatttgatgaattaggagtaatctaatgctaaacagagaaaataaaacggcaatgacaagaaaaggcatggtatccaatcgattaaataaattttcgattagaaagtacacagtgggaacagcatcaattttagtaggtacaacattaatttttggtctggggaaccaagaagcaaaggctgcagaagtaaccaacaaggaaataaaggaagatgcaacatcagtaaataatgatcaagtgtctaaaaaagttgatacagagcaactaaaagatgagaatattaataaagttgctaatcaaaaagaagtaactagagtagaaaatagtgtcgcttcagaaaaaaataataactctaagccatctgaaaacggaaaattacaaacgtctaatgttaaaaagactgaagataataatgcaacttcagatgatcaagttactactacagttaattcacagcaattaaatactgataacacaacttcaatgtcgtcagcaccgattaatgtacgtaaagatgacttaaaaattaataatgaagaagtaagaaatgtaggagaaaaaagcgataatactgacaatgcaaatagttcagaattaataaagccaaaaactacagaacctaaacgtttgaatacaagaatgcgtatagcagcagtacaaccatcatcaacagactctaaaaatgttaataatttaattacttcaactacaactttaactgtagtcgatgcagataataacaataaaatcgtaccagcacaagattatctagcattgaaatctcaaattgcagttgatgacaatgttaaatcgggtgattatttcacaattaaatattcagatactgttcaagtatatggtttgaatccagaagatattaaaaatattggtgatataaaagacccaaataatggggaaacaattgcgactgcaaaacatgatactgtgaataatttaattacgtatacatttacagattatgttgatcgatttaattcagtaaaaatgggtattaattactcaatttatatggatgcagatacaattcctgttagtaaaaacgatgttgagtttaatgttacgataggtaatactacaacaaaaacaactgcaaacattcaatatccagattatgttgtaaatgagaaaaattcaattggatcagcgttcactgaaacagtttcacatgttggaaataaagaaaatccggggtactataaacaaacgatttatgtaaatccatcggaaaattctttaacaaatgccaaactaaaagttcaagcttaccactcaagttatcctaataatatcgggcaaataaataaagaggtaacagatataaaaatatatcaagttcctaaaggttatacattaaataaaggatatgatgtgaatattaaagagcttacagatgtaacaaatcaatacttgcagaaaattacatatggcgacaacaatagcgctgttattgattttggaaatgcagattctgcttatgttgtaatggttaatacaaaattccaatatacaactagcgaaagcccaacacttgttcaaatggttacattaagttcagacaatagtaaatctgcctcaatgggtaatgctttaggattcactaataaccaaagtggcggcgctggtcaagaagtatataaaattggtaactacgtatgggaagatacaaataaaaacggtgttcaagaattaggagaaaaaggcgttggcaatgtaactgtaactgtatttgataataatacaaatacaaaagtaggagaagcagttactaaagaagatgggtcatatttgattccaaacttgcctaatggagattatcgtgtagagttttcaaacttaccacaaggttatgaagtaaccccttcaaaacaaggtaataacgaagaattagattcaaacggtttatcatcagttattacagttaatggcaaagataatttatctgctgacttaggtatttacaaacctaaatacaatctaggcgactatgtatgggaagatacaaataaaaatggtatccaagatcaagatgaaaaaggtatatctggcgtaacggtaacattaaaagatgaaaacggtaacgtgttaaaaacagttacaacagatgctgatggcaaatataaatttactgatttagataatggtaattataaagttgaatttactacaccagaaggctatacaccgactacagtaacatctggtagcgatattgaaaaagactctaatggtttaacaacaacaggtgttattaatggtgctgataacatgacattagatagtggattctacaaaacaccaaaatataatttaggtaattatgtatgggaagatacaaataaagatggtaagcaggattcatctgaaaaaggtatttcaggcgtaacagttacattgaaaaatgaaaacggtgaagttttacaaacaactaaaacagataaagatggtaaatatcaatttactggattagaaaatggaacttataaagttgaattcgaaacaccatcaggttacacaccaacacaagtaggttcaggaactgatgaaggcatagattcaaatggtacatcaacaacaggtgtcattaaagataaagataacgatactattgactctggtttctacaaaccgacttacaacttaggtgactatgtatgggaagatacaaataaaaacggtgttcaagataaagatgaaaagggcatttcaggtgtaacagttacgttaaaagatgaaaacgacaaagttttaaaaacagtaacaacagatgaaaatggtaaatatcaattcactgatttaaacaatggaacttataaagttgaattcgagacaccatcaggttacacaccaacttcagtaacttctggaaatgatactgaaaaagattctaatggtttaacaacaacaggtgtcattaaagatgcagataatatggacattagacagtggtttctataaaacaccaaaatatagtttaggtgattatgtttggtacgacagtaataaagacggcaaacaagattcaactgaaaagggtattaaagatgtgacagttacattgcaaaactgaaaaaggcgaagtaattggaacaactaaaacagatgaaaatggtaaatatccgctttcgataatttagatagcggtaaatactaaagttattctttgaaaagcctgctggcttaacacaaacaggtacaaatacaactgaagatgataaagatgcagatggtggcgaagttgatgtaacaattacggatcatgatgatttcacacttgataatggctactacgaagaagaaacatcagacagcgactcagagtcagacagtgattcagactcagatagcagactcagactcagatagcgactcagactcagatagtgactcagactcagatagtgactcagactcagacagcgactcagattcagacagcgactcagactcagatagcgactcagactcagacagcgactcagactcagatagcgactcagactcagacagtgactcagactcagatagcgattcagactcagacagcgattcagactcagacagtgattcagactcagatagtgattcagactcagacagcgattcagactcagacagtgattcagactcagacagtgattcagactcagatagcgactcagactcagacagcgattcagattcagaaagtgactcagattcagatagcgactcagactcagacagtgactcggactcagacagcgattcagactcaaatgcaggtaaacatacaccggctaaaccaatgagtgaagttaaagaccatcacaataaagcgaaagcattaccggaaacaggtagtgaaaataataattcaaataatggcacattattcggtggattattcgcggcattaggatcattattgttattcggtcgtcgtaaaaaacaaaataaataatattattaacttaaccaggtccgtgaggcctggtttttttatttcaaaatttatgaaatgtatcttatgtttgagattaaatagtgcgatgttttaaaaaatataacataaatcaacataaatttaattcatctttacattaaaagtacaaacgaataagaaaagcaattaaacacagtatcaaaccatttaaaacaattgatataaaaaacaaacgaataattaaacattactagaattaatttattcaaaccaaagtgtaaaataacggtcttagataaataaatttatttaaagtattgtgctttatctaaaaatgtattacgatgggaatacaaatttttatatgtaaaaatattaattttttgcaaatattgatattttaaaggagatttatatgattaacagggataataaaaaggcaataacaaaaaagggtatgatttcaaatcgcttaaacaaattttcgattagaaagtatactgtaggaactgcatcgattttagtaggtacgacattgatttttggtctagggaaccaagaagctaaagctgctgaaaacactagtacagaaaatgcaaaacaagatgatgcaacgactagtgataataaagaagtagtgtcagaaactgaaaataatccgacaacagaaaataattcaacaaatccaattaagaaagaaacaaatactgattcacaaccagaagctaaagaagaatcaactacatcaagtactcaacaacagcaaaataacgttacagctacaactgaaactaagcctcaaaacattgaaaaagaaaatgttaaaccttcaactgataaaactgcgacagaagatacatctgttattttagaagagaagaaagcaccaaataatacaaataacgatgtaactacaaaaccatctacaagtgaaattcaaacaaaaccaactacacctcaagaatctacaaatattgaaaattcacaaccgcaaccaacgccttcaaaagtagacaatcaagttacagatgcaactaatccaaaagaaccagtaaatgtgtcaaaagaagaacttaaaaataatcctgagaaattaaaagaattagttagaaatgatagcaacacagatcgttcaactaaaccagttgctacagctccaacaagtgttgcaccaaaacgtgtaaacgcaaaaatgcgctttgcagttgcacaaccagcagcagttgcttcaaacaatgttaatgatttaattaaagtgacgaagcaaacaatcaaagttggcgatggtaaagataatgtggcagcagcgcatgacggtaaagatattgaatatgatacagagtttacaattgacaataaagtcaaaaaaggcgatacaatgacgattaattatgataagaatgtaattccttcggatttaacagataaaaatgatcctatcgatattactgatccatcaggagaggtcattgctaaaggaacatttgataaagcaactaagcaaatcacatatacatttacagactatgtagataaatatgaagatataaaatcacgtttaactctatattcgtatattgataaaaaaacagttccaaatgagacaagtttgaatttaacatttgctacagcaggtaaagaaacaagccaaaatgtcactgttgattatcaagatccaatggttcatggtgattcaaacattcaatctatctttacaaaattagatgaagataagcaaactattgaacaacaaatttatgttaatcctttgaaaaaaacagcaactaacactaaagttgatatagctggtagtcaagtagatgattatggaaatattaaactaggaaatggtagcaccattattgaccaaaatacagaaataaaggtttataaagttaactctaatcaacaattgcctcaaagtaatagaatctatgattttagtcaatacgaagatgtaacaagtcaatttgataataaaaaatcatttagtaataatgtagcaacattggattttggcaatattgattcagcttatatcattaaagtagttagtaaatatacacctacatcagatggtgagctagatattgctcaaggtactagtatgagaacaactgataattatggttattataattatgcaggatattcaaacttcatcgtaacttctaatgacactggtggtggtgacggtactgttaaacctgaagaaaagttatacaaaattggtgactatgtatgggaagacgttgataaagacggtgttcaaggtacagattcaaaagaaaagccaatggcaaacgttttagttacattaacttacccggacggtactacaaaatcagtaagaacagatgctaatggtcattacgaattcggtggtttgaaagacggagaaacttatacagttaaattcgaaacgccagctggatatcttccaacaaaagaaaatggaacaactgatggtgaaaaagactcaaatggtagttctgtaactgttaaaattaatggtaaagatgatatgtctttagacactggtttttataaagaacctaaatataatcttggtgactatgtatgggaagatacgaataaagatggtatccaagatgctaatgaacctggtatcaaagatgttaaggttacattaaaagatagtactggaaaagttattggtacaactactactgatgcctcgggtaaatataaatttacagatttagataatggtaactatacagtagaatttgaaacaccagcaggttacacgccaacggttaaaaacactacagctgaagataaagattctaatggtttaacaacaacaggtgttattaaagatgcagataattggacattagacagtggtttctataaaacaccaaaatatagtttaggtgattatgtttggtacgacagtaataaagacggcaaacaagattcaactgaaaagggtattaaagatgtgacagttacattgcaaaacgaaaaaggcgaagtaattggaacaactaaaacagatgaaaatggtaaatatcgtttcgataatttagatagcggtaaatacaaagttatctttgaaaagcctgctggcttaacacaaacaggtacaaatacaactgaagatgataaagatgcagatggtggcgaagttgacgtaacaattacggatcatgatgatttcacacttgataacggatacttcgaagaagatacatcagacagtgattcagactcagacagcgactcagattcagacagtgattcagactcagatagcgactcagactcagatagcgactcagactcagatagcgattcagactcagatagtgattcagactcagatagcgactcagactcagatagcgattcagactcagacagtgactcagattcagatagcgactcagactcagacagcgactcagactcagacagtgactcagattcagatagcgactcagactcagacagcgactcagactcagacagtgactcagattcagatagcgactcagactcagacagtgactcagactcagatagcgattcagattcagatagtgactcagattcagacagtgactcagattcagatagcgattcagattcagacagcgactcagactcagacagtgactcagattcagatagcgactcagactcagatagcgattcagattcagatagtgattcagattcagacagtgactcagactcagatagcgactcagattcagatagcgattcagattcagatgcaggaaaacacacacctgttaaaccaatgagtactactaaagaccatcacaataaagcaaaagcattaccagaaacaggtagtgaaaataacggctcaaataacgcaacattatttggcggattattcgcagcattaggttcattattgttattcggtcgtcgcaaaaaacaaaacaaataatacaatatgacccaggtccttgtggcctggtttttttatgattacacatgcaatagatgtatttttcatataaaataaacaataaagatacggaataaaacttatatgaggcgataatatgaattacattttaggaacaattttagaaagtaaaattacaggtgtagaaaaagcgcaaataaatagactgaagttgttcaaacaacacggcatatcttcaaaatgtgtatatgttaaatggaatccttattcatacacatatgcgaagcaacatcagattgaaaatgatctgtttacaatgtatgactattttcaaaaagcaatcaattataaaaagacaaagcaagttaactggatacagtattgggaaaagtcatgtaggtacacgttgaaatttgtggaaaattcaaatgatgtcagaatatatgatgaagagcaatttataatgtatgctcattttttagataaacagtatcatcaattaaactatgtgaattattttgaccaaaaaagaagaaaagtaaaacgtgaattgtatgatggaagaggctttttaagttgttctcgaattttaggtgaagggcaacggattgtactcgaaaattactatacacctaatggggaaatcgtcatccaaaaatatttcgacgatataaaaggggaaaacacgctcacaaaggttatcttaaatgaagaccaggatcaacaattttttgatacagaagatgaattagttcaatattttctccatcaattatgtaaaaataatgatcaaatcatattagaccgtcctcatgaattaggaaatgttattgcgggattaaatcaaagtattccagttattgttgtgctccacagtacacatttatccggcaccggtaatgatataaaaagtttttataaaacagtgtttaataatttaacacgttataaagcgattgttgtatcaacagaaaagcaatgccaagatatttcgcaatatattgaaaataaaataccagttatcaatattccggttggctacgtggcaaacttaaagtatcaatttgacagcaatcaaaaggataaaaatcatatcatatcaattgctcgcctcgttgaaaataaacaaattaaacatcaaattgaagtgatcaagcaattagtaacaaaacatcccaatattcaattgaatatttatggacatggaaatggtttgtcagaatatcgacaacttgtagaagattatcatttatcggaacatgttaaattacatggttttaagacgcatattaatgaagagattgctaaagcagaactgatgttatcgacaagtaaaatggaaggttttggcttagcaattttagagtcgctttcagtaggtacaccagtaatcagttatgatgtagattatgggccatcagaactgattcaagatggatttaatggctatttagtacctcaaggtgacatcaatcaaatggttgaaaaggtcgatcaattactaaataatactcaaatgatgcaacaattttcgattaatagtatagaatctgcacaacagtacaatgcaactactatcagtacaaagtggcaaaatattttaaactaagtcaaaagaaaaaagcattttcctagaatcatctatttaacaaaccacgttcatacgaactgacaagtttgattaaatgacataggaaaatgctttttttataaaaataaaggtaaagtacatttatataagacgaacaaactggtcccattgtttaattaacgacgctttactatattgttgcgcttttgccaaactaccttttgacagtcgttgttgtacttcaggatgatcaatcacatattttactttatcaaatagggcatcttcatcatttttagtaattaaataaccattgaaatcaggcgtaatcaattcgttaggtccatatttaatatcataactaataactggaacaccatttgctaaagattcaagtagcgctaaagagaaaccttccatgttacttgttattaaactcaaataggcatcgctatattcttggtctagattgcttaaaaagccgcgtaagtaaacatgattttccaatccatatttttgtatcaattcatttaattttttactttcagaaccaaaaccatacatatgaagctctattttagggacataagatactaagcgtttaattaattcaatttgttgatgtaattgtttttcaggtgaataacgagcaacggaaattaatttaacactgcgctgatctaatgtttggactggtgtatcaattgtttcactatagccgacaggaatattaacaactggaatagtatggttaatacgtttttcaacatctaatttttgctgctcagtagaaacgataattgcacgatatcgagataaattttcaaacatcgctttatatacatttttaaatggcgatgaatctaatgcatcaatatttttaatgtgtgtactgtgaagcacagctactactgggattgactcaggtgttaagttgaaaataggtgctgtatacacattacggtcactgaaaaataaatccccatgttgatatagttgtttaatgaaaaatgcgcctaattccgtttcattattaaagaaatattgtttgttagcatagtaaacaataattttttgtacttctggtttgccatctttgtaagaaaaatacttttctaattttgtgtcaccttctggattatagaaaaattcacataatgtttgttgtttatcaacaaggatcctactacaacttaaaaagccacgcacatcataaaaatcacgttttacttttcgtctttgactatcaaaatgattcacataatctaatatacgatatttaggatcttgaaaatgggcatacattaagaaacgctcttgatcatatattctaaagtcatgactattttcaacatgttttaaagtataatgacattcatcagtccaatatgacaaccagtcaaatggttcattgcgttctaaatatgttgcttcttggaagaaatcatacatattaatatagtcagaactagtaatataattttgggcatttctatataaatatctattccatgacagaaatacacattgcgctggtcttcccatttctttaaataaatttaaacgattaataattgctttctctatcccagttaaattaacacctaaactattacctacaaaataattcatttacaacaccacttatatctattttttataattatatcacataatatttaattacttcttttaactggaagatgtgtttatttataaaactacaagttttgatatttataatggtagtagttattcagtcaactacgaccaatatatcattgtagagcttaggaatttgatttatgactcaggtacatcaaatgagaagatttataaaagagatatacaactctaggaggtataataaaaacgcgcaactactgttacgcgtttgaattaatcatatgatattatttacgatactttaatttagcgaaagcatcatgttgatggatagactcttcattgcgacattcgatatcgaaaccgtctaaccaatcaaattcaactaagtctgcggcaattaaacgaattaagtcttcgacaaaacgtggattttcatatgcacgctctgtcacacgtttttcatcaggacgttttaaaatagggtatagaattgaacttgcattagcttccattgcatctaaaattttgtttttatagtcatcaactatgtcttgatctttattaatatatgttttaacagtgacaacaccacgttggttgtgcgctgaatattcacttatttcttttgaacaagggcatagcgttgtgacagttgcttcaatagtaagttctttacgtgtaactttatcaccgtcaattgctaatccataagtgacatcggcattaccaactgctttaatatttgtggttggactatagcgatcaaagaaccatttcccagaaacatcaacgcctgccgcattttgtttcatattcgtttgtaaagtgcgtaacacctgataaagtgtattaaattcaagttcaataccattatcatagtgcttttcaacactttcaataatacggctcatattaatacctttttcgtcttttgttaaacttgttgaaaaactaaatgtgccagctgtttgatactggtcaacaagtacagggtacactaagtttttaataccaacttcttctatttcaaataagaaatctttatgtgtactttgtaaatctgtcatttcgttcttagtagtaggtttcgtgccttcaataggatctacggaaccaaagtgtttccaacgaccttctcgtgtcgataaatcaaattcagtcatttttttcctccgttaagatttaaagtgatatgtccaatatggttcgactgttaaaaagctgtgttgtttaccatcgatttcaggacttgctaattgttttaaaaatggacctgtttgagaagcatgtgcttcaaatgccttaattttaagttctttaaaatctgtaatatcattttgaatatcaggctctccaagagcttcggttgcatcattactgaacgcaactaaagttaaacgagggcgttcttctttaggcatgcgttcaaccgttcgaattacagcgtctgctgttgcttcgtgatcaggatgtactgcatatccaggataaaatgaaataatcaatgatggattcgtatcatcgattaaagatttaatcataccatctatatgttcatagggttcaaattcgacagttttgtcacgtaaacccatttttcttaaatcagtaataccaataactttacaagcttcttctagttcacgctcacgaatacttggtaatgattcgcgtgttgcaaatgggggattacctaaatttctgcccatttgtcctagggttaaacatgcgtatgttacaggtatgcctttttggatataacttgctaatgtgcctgcagatgagaaggtttcatcatcaggatgtggaaatattactaatacatgtctttcgtcagtcatgttgatgcctcctctataaattaaatggtcgctcactaatttgaagtgctgcagcgagttgaccttcgtaattaaaacctgcaattaaaaattcatcatgctcattgatctcaaaatgcgttagaccttgtacataaacccaaccaccatttgatagtttaagaccaatgcgataaggttctttattaccaccttttagttgtgcatgcgtatatgttacttgtatgtttcttaaaaatgtaccagcattaaaaacacgttgatcgaaatggttcgcataggccccatttgtcgtttcaacatgcagatacacaggtttatgttcaaaagaagcaagtaaatctataacttcttgttctttaattggttccaacacgttcactccttacactatcaatgtgtttatctttctattttactaaaaactattcaataattgtatacgattgctcaattatttataaattaattttcatgaagggtaattactcaggattacgcaatcatacagcattagttttttacttttaaaaatcaaaaatttgttggaatttgaaaagtgttaaacattaaaaataatgctatattaatggtgtatgaatgaattcataagtttttaaaatgtattaaatttgtggaggcatgtaaacaatgaaagtattaaacttaggatcgaaaaaacaagcatcattctatgttgcatgtgagttatataaagagatggcatttaatcagcactgtaaactaggtttagcaactggcggtacaatgacagatttgtatgaacaacttgttaagttattaaataaaaatcagttaaacgtagacaatgtatccacgtttaatttagacgaatatgtaggtttaaccgcatcacatccgcaaagttatcactattatatggatgacatgcttttcaaacaatatccttattttaatagaaagaatattcatattccgaatggagatgccgatgatatgaatgcggaagcgtcaacatataatgaccttttagaacaacaaggtcaacgtgatattcaaattttaggtattggagaaaatggtcatattggatttaatgaacctggtacgccgtttgatagcgttactcatatcgttgatttgactgaaagtactattaaggctaatagtcgatattttgaaaacgaagatgatgttccaaagcaagccatttcgatgggacttgctaatattcttcaagctaaacgtatcattttactcgcatttggtgaaaagaaacgtgctgctattacacatttattaaatcaggaaatttctgttgatgttccagccacattacttcacaaacacccgaatgttgagatatatttagacgacgaagcttgcccgaaaaatgttgcgaaaattcatgtcgatgaaattgattgattgcaatgtttaattaagaaatgcctcgggaaaggttccaatagaaagataaaaagcattggaaggatgatttttagtggaattacaattagcaattgatttattaaacaaagaagacgcggctgagttagcaaataaagtaaaagattatgtagatatcgtagaaatcggtacgccaatcatttataacgaaggtttaccagcagttaaacatatggcagacaacattagtaatgtaaaagtattagcagacatgaaaattatggatgcagctgattatgaagttagccaagcaattaaatttggcgcggatgtaattacaatactaggtgttgcagaagatgcatcaattaaagcagctattgaagaagctcataaaaataataaacaattactagttgatatgattgctgttcaagatttagaaaaacgtgcaaaagaactagatgaaatgggtgctgattatattgcagtacacactggttatgatttacaagcagaagggcaatcaccattagaaagtttaagaaccgttaaatctgttattaaaaattctaaagttgcagtagcaggtggaattaaaccagatacaattaaagaaattgtcgctgaaagtcctgaccttgttattgttggaggcggaatcgcaaatgcagatgatccagtagaagctgcaaaacaatgtcgcgctgcaatcgaaggtaagtaatatggctaaatttagtgactatcaattaattctagatgaattaaagatgactttgtcacatgttgaagcggatgagttttcaacgtttgcgtccaaaatactacatgctgaacatatatttgtagctggcaaaggacgttcaggattcgtggcgaatagctttgcaatgcgcttaaatcagctcggcaaacaggcacatgttgttggagaatcaacgacacctgcgattaagtcgaatgatgtatttgtaattatctctggttcaggttccacggaacatttaagattattagcagataaagcaaaatcagtaggtgctgacatcgtattaattactacaaataaagattctgcaataggcaatctagctgggatgaacatcgatttgcctgcaggtacaaaatatgatgaacaaggttcggcacaaccattaggaagtttgtttgaacaagcatcacaattatttttagatagtgttgtaatgggattgatgactgaaatgaatgttacggaacaaacgatgcaacaaaatcatgctaatttagaataaaaacaaagatagtcgataatatgatgcctaggcagaaatattatcgattatttttttatttaaatattaaattatagtataatgtcattaacaaacgaacgggagtgttaatagtgaagtttgacaattatatttttgatttcgatggtacattagcagacacgaaaaaatgtggtgaagtagcaacacaaagtgcatttaaagcatgtggcttaacagaaccatcagctcaaaacataacgcattatatgggaatacctattgaagaatcatttttaaaattagcagaccgaccattagatgaagcagcattagcaaagttaatcgatacatttagacatacatatcaatctattgaaaaggactatatttatgaatttgcgggtataactgaagccataacaagtttgtataaccaagggaaaaaacttttcgtggtgtctagtaagaagagtgatgtattagaaagaaatttatcggctattggattaaatcacttgattaccgaagctgttggatccgatcaagtaagtgcatataaaccaaatcctgaaggcatacacacaattgtgcaacgctacaatttaaatagccaacaaacggtttatattggtgattcaacatttgatgttgagatggcgcaacatgctggtgtaccatctgcagcagtaacatggggagcacatgatgcaaggtcattactccattcaaatccagattttataatcaatgatccatcagaaattaatacagtattataaaatttgttaaaacagagaataccatggttaaaatgcatattcataaatattagattatacatagaaatatttcgctttagattaggaatttaaaataaatatttattaaacattatgaatttttaaagagtgatgtctgattcgttgatcatcaatttttgtgaaaataaattaaagtaatgacaaagttattgaagtaaattgaatataaacatttaaatatgatgaggaaagtagtgatagcatatgacttacatgaagttgtgtgctatcgctatttttaattataaatctaatatgttaatcgttcgatgatttaagaattattattgtttaattcaaatgtacgagggtataaaatcattgaatttaattcgttaaagtgaaattttttgtcgaacatacttttgcatttatataaaagtttatatttgtataaatttgacaaaactaattaactccgtataattatgaaacatacaaaagggagtgtatgaattcatggattttaataaagagaatattaacatggtggatgcaaagaaagccaaaaaaaccgttgttgcaaccggtatcggtaatgcaatggaatggtttgattttggtgtctatgcatatacaactgcgtacattggagcgaacttcttctctccagtagagagtgcagacattcgacaaatgttgactttcgcagcattagccattgcgtttttattaagaccaattggtggtgttgtatttggtattattggtgacaaatatggacgtaaagttgtattaacatcaacaattattttaatggcattttcaacattaaccattggattattgccaagttatgatcaaattggactttgggcaccaatactattattgcttgcaagagtactacaagggttttcaacaggtggagagtatgcgggtgcaatgacatatgtagccgaatcatctccagataagcgtcgtaactcattaggtagtggactagaaattgggacattatcaggttacatagctgcttcaattatgattgctgtattaacattctttttaacagatgaacaaatggcatcatttggttggagaatcccattcttacttggtttattcctaggattatttggcttatatttacgtcgtaagcttgaagaatcaccagttttcgaaaatgatgttgcaacacaaccagaaagagataacattaactttttacaaatcatcagattttattacaaagatatatttgtgtgttttgtagctgttgtattcttcaatgttacgaactatatggtaactgcatatttaccaacctatttagaacaagttattaaattagatgcaacgacaacaagtgtattaattacttgtgtcatggcaataatgattccattagcattaatgtttggtaagttagcggataaaataggtgaaaagaaagtatttctaattggtactggtgggctaacattatttagtatcatcgcatttatgttattacattcacaatcatttgttgtaatagtaatcggtatatttatattaggatttttcttatcaacttacgaagcgacaatgccagggtcgttaccaacgatgttttacagtcatataagatatcgaactttatcagtaacatttaatatctctgtttcgatatttggtggtacgacgccattagttgcaacatggttagttacgaaaactggagatccattagcacctgcgtattatttaacagcaatcagtgttattggctttttagttattacattcttacatttaagtacagcaggaaaatctctaaaaggttcgtatccaaatgtagataacgagcaagatagagcttattatgcagaacacccaaaagaagcattatggtgggttaaagaacgtaagaattagagattataataaaaagtataaatcaatcgtatataagcactttaaagctagtaggttctgctaactttaaagtgctttttaaattgagaactgtaattagctgtaataaagtttttgtatatacataaacccccactgcaatgattatcgcaatgggggaaagaggggacttaaagcatatgtttagctttgaatacttaaaattctcttgctattgaaatgttaggatgtaaatatgtcttagagtattttgtccaacgcaattaatattgagactctaaccttcaatattattatagagaacacaaacttaaatagattgggtgacttatttgtgtcagttattgcgattgcgataacttcttttctctatatacatatagtaacgtcttaactaataaaaaacatggtactacagtatcaaatttatctagggcttaagtttgatttttataataggcaggtttacctgataaaaatacttattcattatataatgttaacaagatgtattttaaagtttacattgagtgagggatattgatgaacgtaattttagaacagttgaaaacacatactcaaaataaacctaatcacatagcattacatatcgatgatgaaacaattacatatagtcaactaaatgcccgcatcactagcgcagttgaatctttgcagaaatattcacttaaccctgtcgttgctattaatatgaaatcaccggtgcaaagtattatttgttatttagctttgcatcgtttacataaagtgcctatgatgatggaaggtaaatggcaaagtactatacatcgtcaattgattgaaaaatatggtattaaagatgtaattggagatacaggtctcatgcagaatatagactcacctatgtttattgtttcaacgcaattacagcactaccccaatttattacatattggttttacttcagggacaactggactgccaaaagcatattatcgtgatgaagattcatggctggcttcttttgaagttaatgaaatgttgatgttaaaaaatgaaaatgccatagcagcccccggacctctatcgcactcgttaacattatatgcgttattgtttgctttaagttccggtcgtacttttataggacagaccacttttcatcctgaaaagttacttaatcaatgtcgtaaaatatcatcatacaaagttgctatgtttcttgttccaacgatgattaaatcattattgttagtttacaacaatgaacatacaatccaatcattttttagcagtggagataagctgcattcttctatttttaaaaagataaaaaatcaagcaaatgacataaatttgattgaattttttggtacatcggaaaccagttttatcagctataacttgaatcagcaagcaccagttgaatcagtaggtgtgctatttccaaatgtggaattgaaaacaacgaatcacgatcacaatggtataggaactatttgtataaaaagtaatatgatgtttagtggctatgtaagcgaacaatgtataaataatgatgaatggtttgttactaatgataatggctatgtaaaagagcagtatttatatttaacgggacgacaacatgatatgttaattattggtggtcaaaatatatatccagcacatgttgaacgccatttaacgcaatcgtcgagcattgatgaagcaattataatcggtattccaaataagcgttttggtcaaataggtgtattgctttattctggtgatgtgacacttacacataaaaatgtaaaacaatttttaaaaaagaaagtgaaacgctatgaaattccatcgaagattcatcgtgtagaaaagatgtattacactgcaagtggtaaaattgctagagaaaaaatgatatcgatgtatttgagaggtgaattataatatgaatcaagcagtcatagttgcagctaaacgaactgcatttgggaaatatggaggcactttaaaacatttagagccagaacaattgctcaaacctttattccaacattttaaagagaagtatccagaggtaatatctaaaatagatgatgtagttttaggtaatgttgttgggaatggtggcaatattgcaagaaaagcattgcttgaagcagggcttaaagattcaatacctggcgtcacaatcgatcggcaatgtgggtctggacttgaaagtgttcaatatgcatgtcgcatgattcaagccggagctggcaaggtatatattgcaggcggtgttgaaagtacaagtcgagcaccttggaaaatcaaacgaccgcattctgtgtacgaaacagcattacctgagttttatgagcgtgcatcatttgcacctgaaatgagagacccatcaatgattcaaggtgctgaaaatgtagccaagatgtatgatgtttcaagagaattacaagatgaatttgcttatcgaagtcatcaattgacagcggaaaatgtaaagaatggaaatatttctcaggaaatattacctataaccgttaaaggagaaatattcaacactgatgaaagtctaaaatcacatattccgaaagataactttggccgatttaagcccgtgatcaaaggtgggaccgttaccgctgcgaatagttgtatgaaaaatgatggtgcagttttattgcttattgtggaaaaagatatggcatacgaattaggtttcgagcatggtttattatttaaagatggtgttacggtaggtgttgattctaattttcctggcattggtccagtaccagccatttccaacttactaaaaagaaatcaattaacgatagaaaatattgaagtcattgaaattaacgaagcgttcagtgcacaggtggttgcctgccaacaagctttaaatatttcaaatatgcaattaaatatatggggtggtgcattagcatcaggtcatccatacggtgcaagcggtgcccaattagtgacgcgattattttatatgtatgacagagagactatgattgcatctatggggattgggggaggtctaggaaatgcagcattatttactcgattctaaccagcgattaaatgtgtcattttctaaggatagtgtggctgcatattatcagtgttttaaccaaccttatagaaaagaagtaccaccattaatgtgtgcgtcattatggccaaaatttgatttatttaaaaaatatgcaaatagcgaactgattttaacaaaatcagcaattaatcaaactcaaaagatagaagtagacacaatatatgtaggacatttagaagatattgaatgccgacagattcgcaatatcacacgttatacaatggctttaacattaactaaaaatgatcaacatgttataacggttacacaaacttttattaaggcgatgaagtagagatgaagtttaatgagatatggataaatgaatatttggcgctcgtaaatgatgataatccaatacataatgagattgtgccaggacaattagtgagtcaaatgatgctgatggctatgtcaatagaggcgaaccagtgtcaaattaactacgttaaacctattttaataaatgaaaatatcgaattcattgaacaacacgagcaagaaatgatagcaattaatgacgatggagagattaaaataaagatttctttgagcacaaaaaaataaccgatattagctgcatgaacgcatattaattaggagatgaaaggacagctaatatcagttatgtattgttattattattgggaacagagataaatataggttacgtttctttctttgcacggggatgcattaatctaaaataataataacaactatatcaatgtttaataaattctggattattggaacgattagtcaatttaactaactttcatatgatctatatcgtcttgtaataaagagagcaatttgaatatttcagtatcactaaatgaatcgtcacatttaattgaaacatgctgaaacgttttggttataatttcataaactggtgcgccttcatggtgatactgtcgataaataatcataacctatattacctcctttgctactctatggttatattataaataacatttttacgtgttacatcaaccttaagtatcaactttttatcagacatagaacgtatgatttactaagactatttatgtatcatgttttaaaaggaatatatttttataaagtcgttgagaagttatttttaatatcaaaaaaatggcaaaattagtagagcgggataaaacgttatgtttaaacaagggcataataaagttccgaaaggatttggttttttaggataactgattcgtgacactgtaaatgaatattatatacatatgttgaaataaaactacatataacgatgacttacaatacttatttgtccaatttaactgtgaaaatcaaacaagtatttaataactaaaataaccacaccgaaagtgactttattgtgcactgagccccaaagttagactttgaaagctaactttactggcgcacagcaatgacactcaaatcataaggtgtggttaatctattttttatgaacgaagcattaaacctctgttacttcaacatcgatatgttcaatacggttgtatgcaccgtgatccacaggaccaacaaaatcattcattttccaaccgtttttaatagcagaagcgacgaaagctttcgcgctaatcacagcttcttttggtgacttaccgttagctaaatatgcagttgttgccgcagcaaatgtacaaccagcaccatggttataactttgttggaacatgtctgtagttagttgataaaatgtttgaccatcatagtataagtcatacgatttatcttgatctaaagctttgccacctttaatgatgacatgctttgcgcctttatcaaagataattgttgcagcctttttcatatcttcaattgaatttaatttacctaatcctgataattgacctgcttcaaataagtttggtgtcactaccgttgctttaggtagtaaatatttaatcatcgcctcagtatttccagggttaagcacttcatcttcgcctttacaaaccatgacaggatctactacaaagtattgtgcattagatgcctcatatacttctccagcacgtttgattatctcctcagtacctaacatacctgttttaatagcatcaggtccgattgataaagccgtttcaagttgcttttcaaatacatccataggtaatggtgtgacatcgtgtgaccatgtatctttatccatagtaacgatggcagttaaagcgaccatgccatacgtatctaattcttggaacgttttcaaatctgcttgcatacctgcaccagcacttgtgtcagaaccggcaattgttaaaactttctttaaagccattgagcttcactcctacataataatattgtattcatcatatcatttttaacctaattgaaaaatattaagcattcaatatttgatggttgttgaaatgaatcattcatactattgtaacttttgaaaatgtcattcactttagataagtgtgatatgttaaaatatgtcctgaggtgagattgaatggaatggtcgcaaatttttcatgacataacaacgaaacatgactttaaagctatgcatgattttttagaaaaagaatattcgactgcaatcgtataccctgatagggaaaatatatatcaagcgtttgatttaacaccgtttgaaaatatcaaagttgttatattaggacaagacccgtatcatggtccaaaccaagcacatggattagcattttcagtgcaacctaacgcaaaattccctccatctttacgtaatatgtataaagaattagcagatgatattggatgtgttagacaaacaccacatttacaagattgggcaagagaaggcgtcttgttattaaatacagttttaaccgtaagacagggtgaagcaaattctcatcgtgatattggttgggaaacatttactgatgaaattattaaagcagtgtctgattataaagaacatgttgtctttattttgtgggggaaacctgcacagcaaaaaataaagcttatcgatacatctaaacattgtattataaaatcagtgcatcctagtccactgtctgcatatagaggattctttggatcaaaaccgtattccaaagcgaatacctatttagagtcagtaggaaaaacaccaattaattggtgtgaaagtgaggcgtagatggtgaatagagaaactttaatagcacgaattgagcaagaattagtacaagcagagcaggcgcagcatgaccatgactttgaaaaacatatgtatgccatacatatattaacatctttatatgcttcaacatcaaatacgccacatattggtgaacaacaaatgaatcatcgtattgctaaccataatcaaatgccacaatcacaaataacgcagccaactcatcaagtgacagctgctgaaattgaagcgatgggtggtaaagtaaatacgcattcagcacatcatcataataagtcatattcacaaccttcaaaccaacaacaaagattagcgacagatgatgacattggcaatggtgaatccatatttgatttttaaaaagcaacaatgaaacataattgcttaatagcttgctaagtatgtaggttaataatcaagacgcatatacttttattcgagtgttcggatttaaacatttattaatactgaattatataaggagaggtagcaatgaaattatttattattttaggtgcattaaacgcgatgatggctgtcggaacaggtgcatttggtgcgcatggtttacaaggaaaaataagtgatcactacttatcagtatgggaaaaagcaacgacgtatcaaatgtaccatggcttagcattattaattataggtgtaattagtggtacaacttcaatcaatgttaactgggctggctggttaatatttgctggtattattttctttagtggatcattatatattttagtattaactcaaattaaagttttaggtgcgattacaccaattggtggcgtattgttcatcattggatggataatgttaatcattgcgacattcaaatttgctggttaaattttaaaactttagattacctatgtaactaaacattaaatttttaataaaaataatcaagaaaaagagttacaaactcatcttttgggtatagaataccttcgaggtgagtttttatttatggaaaaaaagaataagcaaatagatagaggcgatttaaaacaaaacctatctgaaaagtttgtatgggcgattgcatatggttcatgtatcggatggggcgcattcatcttaccaggagactggattaagcagtcaggtccgattgcagcatcaattggtattgttattggtgcattattaatgatattaattgcggttagttatggcgcattagtagagagatttccagtatcagggggcgcgtttgcctttagtttcttaagtttcggcagatatgtgagtttcttctcatcatggtttttaacttttggttatgtctgtgtcgttgctttaaatgcgaccgcattcagtttactagttaaattcttattgccagatgtcttaaataatgggaaactatacaccattgcgggctgggacgtttatattacggaaatcattattgcgaccgtattactacttgtattcatgctagtaacgattcgtggcgcaagtgtatctggatcattacaatattatttctgtgtggcgatggtaatagtcgtattattgatgttctttggttcattctttggtaataattttgcacttgaaaatttacaaccgttagctgaacctagcaaaggatggttagtgtctattgtggttattgtatccgtggcaccatgggcatatgttggatttgataatattccacaaacagcagaagagtttaactttgcaccaaacaagacatttaagcttatcgtgtacagtttattagcagcatcattaacttatgttgtcatgattttatacactggttggttatcaacaagtcatcaaagtttaaatgggcagttgtggttaacaggtgctgttacacaaacagcatttggttatattggattaggtgtattagcaattgcaattatgatgggtatatttactggtttaaatggattcttgatgagttcaagtcgcttgttattttctatgggacgttcaggtattatgccaacaatgtttagtaaattacatagtaaatacaaaacaccatatgtcgcaatcatattcttagtaagtgtctctttaattgcaccttggctaggaagaacggcattgacttggattgtagatatgtcatctacaggtgtatccattgcctactttattacatgtttgtctgctgcgaaattattcagttataacaaacaaagtaatacgtatgcaccggtttacaaaacgtttgctattatcggctcatttgtatcattcattttcttagcgttgttattagtgccaggttctcctgcagcactgactgcaccgtcttatattgcattacttggatggttaatcatcggtttaatattctttgtgattcgatatcctaaattgaaaaatatggataatgatgaattaagtcgcttgattttaaatagaagtgaaaatgaagttgatgatatgattgaagaacctgaaaaagaaaaaactaaataataaaagaatcgcacagtataccttcttaattcgaaggcgtatcgtgcgattttttgtatcataaattgacatttaagacgaggcagttaaacctcatataaaattgctaagagttaaggctgagccatttctaagaaatatttataatcgtttaaaagatttcacgaacccagaaacaattaatttggaaatttggtcggcgaataataaacctaatgcgatggctcctgcaataagtgtaacctctagcatggtattgattgctgtactgaaatttaataatactaaatttttcgttgcatcataagctaatccacctggtactaatgggatgatacccgtcaccataaaaatgattgcaggttctttttgtttacgtgccatatagtgacttaataaacctagggcaagactgccgaagaaactagagtatatagtatgcacattaaagccgttgaagaataaggtgtaaaccatccatccacacgtaccaacgaaaccacatgatagatataattttctaggtgcatcaaaaatgacgcagaagaacattgaagctaaaaagctaaagataaagtttaagatccaaaacatagtctgatactcctatactaaaattaatacgctaccaacgccagcaccgatgccaaacgcagtaaccaatgcttctaatgatttcgttgtgaacatcaacatgtgtccaccaaataaatcttgtattgcgtttgttattaatacaccaggaacaataggcatgactgccgcaatgataatagttgccaagtcacctgttggaataagtgtatgtccaatgacggcgataatcccaataactaatgaaccaatgaattctgggataaactgtgcgtgtaacttacgatctaaaatctcagtgactaggtatcctagactacctgctaatatcgcagttaaaacatcaatcaatctaccaccttgtaaatataagaaactcattgcaatcattgctgcagcgaaacctttaaagggaagactgctgtcacgcttagcaacatatattttttcaagttgcgtttttgcctcggctaaagaaatttcattgtttgtaatttgacgtgaaattttattagcttgcgaaatttttattaagtttgtatctcgagaggtaattctaaatattctaggaaacgattccgaatgtaatgtaaactggatgacagtgtttgtaacaaagctgttactttcactgtaaccaagtttttttgcaatacgtgtcatggtatcttctacacgcgtaccttctgcaccagattctaatagtatgcgagcagcaagcatgacaacatcttttataagtacctcttgtttgtattcttctgaatttatgtccatttcatcaccattgtttataagaatttaatactcattatagtttatacactataaaataaccacatgagcattttgataagttgttattgattttaaaaaactaatatttgatactattgtaataataatcatcggaatttttagtggttaaaattctcttgaagtataaaaaggaaaaattattgaaaaaaattcgacaaaaatatgtttcaaatatttcaaataggttaaaataatattagttaaccattacaaaaattgtatagagtagcgactgtataatttctattgaggttaacgtttatatgtagtgatagtagttaaagttctcccaaggaagactactcgggtacactttgctatgagcaaagtgtactttgttattgataatacattagcacatatatataagtttaaacatacagatttcaactatttaccaaatcacgtcttatgtatacgggaatatactgaagataaacgaaaaattccaagcttaaaccgataagcttggaattttttattaatttataaacgtaacaatgtattaagaaatcgcaaagaattgatcgaattcgtttgtgttaataatatgtcctacaaagaaactaccgaattcaccgtatcgtgctgttgtttcatcaaatcgcatttcgtatacaatttttttgaattgtaatacgtcatctgagaacaatgttacgccccattcgaaatcatcaaatcctacagaaccagtaataaattgtttgattttaccagcatattttctaccaatcataccatggtcatacattaatttttggcgttcttccatagttaacatgtaccagttataagtttcattacgacgtttgttcattggatagaaacaaatataatcagaatgtggtaattctgggtatagtcttgctttgatatgagggttctcataaggatcttcatcagatttaccagctaaataattgctcaattcaatgactgatacatatgaatatgtagggattaggaagtcagcaatgcgcaatttgttaaattcattttcaatatgatttaaagacttcatttcaggacgtaagaaccataataacaaatctgctttttgaccagttatattataaatagcttgatcaccagattttgatgatcttacagttgctgtattttctaaaaatgattgaaattcagtgacaagtgcatcgcgttcgtcctttggaactagacgtaatgatgcccaatcaactgcataaaataaatgtagactataccaaccatctaatgtttcggctgcttgactcatgtttatcgctccttttcaaaaattatcagttctttataaattttatcataaagcaaaggggtaacgataaaattatgattacaaattggtgacgtggcattatgaaataaaatggcgtataattataccgtgaatgattaataagatttatattacaggaggacattatggctgatttattaaatgtattaaaagacaaactttctggtaaaaacgttaaaatcgtattacctgaaggagaggacgaacgtgttctaacagctgcaacacaattacaagcaacagattatgttacaccaatcgtgttaggtgatgagactaaggttcaatctttagcgcaaaaacttaatcttgatatttctaatattgaattaattaatcctgcgacaagtgaattgaaagctgaattagttcaatcatttgttgaacgacgtaaaggtaaagcgactgaagaacaagcacaagaattattaaacaatgtgaactacttcggtacaatgcttgtttatgctggtaaagcagatggtttagttagtggtgcagcacattcaacaggcgacactgtgcgtccagctttacaaatcatcaaaacgaaaccaggtgtatcaagaacatcaggtatcttctttatgattaaaggtgatgaacaatacatctttggtgattgtgcaatcaatccagaacttgattcacaaggacttgcagaaattgcagtagaaagtgcaaaatcagcattaagctttggcatggatccaaaagttgcaatgttaagcttttcaacaaaagggtctgctaaatcagacgacgtgacaaaagttcaagaagctgtcaaattagcacaacaaaaagctgaagaagaaaaattagaagcaatcattgatggcgaattccaatttgatgctgcgattgtactaggtgttgctgagaaaaaagcgccaggtgctaaattacaaggtgatgcaaatgtctttgtattcccaagtttagaagctggtaatattggttacaaaattgcacaacgtttaggtggatatgatgcagttggtccagtattacaaggtttaaattctccagtaaatgacttatcacgtggctgctcaattgaagatgtatacaatctttcaattatcacagcagcgcaagccttacaataacgatggatttagcgagtaaatattttaatggcgtcaactggcgatatatcgaccattcttctgggttagagcctatgcaatctttcgcattcgatgatacattttgcgaaagtgtgggcaaagatatatcagataatgttgtgcgtacttggattcatcaacatactgttattcttggtattcatgattcaagattgccgtttttaaaagatggcattgattatttaacgaatgagattggttataatgccattgttagaaattctggaggcctaggtgtcgttctagatcaaggtgtattaaatatatcgctgatgttcaaaggacaaacagaaacaacgattgatgaggcgtttactgtgatgtaccttttaattagcaaaatgttcgaagatgagaatgttgatattgatacgatggaaattgaacattcttattgcccaggaaaatttgacttaagtatcgatggtaagaaatttgcaggcatatcgcaacgaagagttagaggcggtattgctgtacaaatttatctttgtgttgaaggctctggttcagaacgtgcattgatgatgcaaacattttatgaacatgctttaaaaggtgaagtgactaaatttaaatatcctgaaattgaaccatcttgtatggcctcattagagacattgcttaacaaaacgattactgttcaagatgtaatgtttttactattatatgcaatcaaagatcttggcggtgtattaaatatgacgccaattactcaagaagaatggcaaagatacgatacgtattttgataaaatgattgaaagaaacaagaaaatgatagaccaaatgcaatagttaaatatttaacagcccctttcaagttatcgtttggggctgttatttttgaaagtatccataaatagcataaatatgttattgacctaatatttaaattgaacatcattaaattaaaagtaatgatatgatggaaataataaatttaataagaaaatttcatgttttacgtattaaatagattgagaatagggtatataatgcgtatgactatgaaagaaacgaccttctattgaaatgttctaatactttagtagtaaatctatatattccaattattatttgtagtattatagttagggtggaaaattataaattgtagggctattttataaaaagataaagaatctgaaatatcactcgataagatttaaactttgaagtaaacgaaagttagttttatactaatcaagttaagtcaaatattaattcaaattaaagattatatataatatgaataatgtgagataaagactgcaatgaaatttaacgcgaatgcgtatgcaacttagaatatgatgtcttttactaataaataaaaataatgaatcaagtataggataaatataaaaggtgatattgacatgacaagaaaaggatatggggaatcgacaggtaagattattttaataggagaacatgctgttacatttggagagcctgctattgcagtaccgtttaacgcaggtaaaatcaaagttttaatagaagccttagagagcgggaactattcgtctattaaaagcgatgtttacgatggtatgttatatgatgcgcctgaccatcttaagtctttggtgaaccgttttgtagaattaaataatattacagagccgctagcagtaacgatccaaacgaatttaccaccatcacgtggattaggatcgagtgcagctgtcgcggttgcttttgttcgtgcaagttatgattttttaggaaaatcattaacgaaagaagaactcattgaaaaggctaattgggcagagcaaattgcacatggtaaaccaagtggtattgatacgcaaacgattgtatcaggcaaaccagtttggttccaaaaaggtcatgctgaaacgttgaaaacgttaagtttagacggctatatggttgttatagatactggtgtgaaaggttcaacaagacaagcagtagaagatgttcataaactttgtgaggaccctcagtacatgtcacatgtaaaacatatcggtaagttagttttacgtgcgagtgatgtgattgaacatcataactttgaagccttagcggatatttttaatgaatgtcatgcggatttaaaggcgttgacagttagtcatgataaaatagaacaattaatgaaaattggtaaagaaaatggtgcgattgctggaaaacttactggtgctggtcgtggtggaagtatgttattgcttgccaaagatttaccaacagcgaaaaatattgtaaaagctgtagaaaaagctggtgcagcacatacatggattgagaatttaggaggttaatgcgttgattaaaagtggcaaagcacgtgcacatacgaatattgcacttataaaatattggggtaaaaaagatgaagcactaatcattccaatgaataatagcatatctgttacattagaaaaattttacactgaaacgaaagtcacttttaacgaccagttaacacaggatcaattttggttgaatggtgaaaaggttagtggcaaagaattagagaaaatttcaaaatatatggatattgtcagaaatagagctggcatcgattggtatgcagaaattgaaagcgacaattttgtaccaacagcagcaggattggcttcatcagcaagcgcatatgcagctttagcagcagcttgtaatcaagcgctagacttgcagctgtcagataaggatttatcgagattggcgcgaattggttcgggttctgcgtcgcgtagtatttatggtggatttgcagaatgggaaaaagggtataatgatgagacgtcatatgccgttccacttgaatcgaatcattttgaagatgaccttgccatgatatttgttgtgattaatcaacattctaaaaaggtacctagtcgatatggtatgtcgttgacacgaaacacatcaaggttttatcaatattggttagatcatattgatgaagatttagctgaagcaaaagcagcgattcaagacaaagattttaaacgccttggtgaagtaattgaagaaaatggtttgcgtatgcatgccacgaatctaggatcaacaccgccgttcacatatcttgtgcaagaaagttatgatgtaatggcgctcgttcacgaatgccgagaagcggggtatccgtgctattttacgatggatgcgggtcctaatgtgaaaatacttgtagaaaagaaaaacaagcaacagattatagataaattattaacacagtttgataataaccaaattattgatagtgacattattgccacaggaattgaaataattgagtaaggaagagataaaatgattcaggtcaaagcacccggaaaactttatattgctggagaatatgctgtaacagaaccaggatataaatctgtacttattgcgttagatcgttttgtaactgctactattgaagaagcagaccaatataaaggtaccatccattcaaaagcattacatcataacccagttacatttagtagagatgaagatagtattgtcatttcagatccacatgcagcaaaacaattaaattatgtggtcatagctattgaaatatttgaacaatacgcgaaaagttgcgatatagcgatgaagcattttcatctgactattgatagtaatttagatgattcaaatggtcataaatatggattaggttcaagtgcagcagtacttgtatcagttataaaagtattaaatgaattttatgatatgaagttatctaatttatacatttataaactagcagtgattgcaaatatgaagttacaaagtttaagttcatgcggagatattgctgtgagtgtatatagtggatggttagcgtatagtacttttgatcatgaatgggtcaagcatcaaattgaagatactacggttgaagaagttttaatcaaaaactggcctggattgcacatcgaaccattacaagcacctgaaaatatggaagtacttatcggttggactggctcaccggcgtcatcaccacactttgttagcgaagtgaaacgtttgaaatcagatccttcattttacggtgacttcttagaagattcacatcgttgtgttgaaaaacttattcatgcttttaaaacaaataacattaaaggtgtgcaaaagatggtgcgtcagaatcgtacaattattcaacgtatggataaagaagctacagttgatatagaaactgaaaagctaaaatatttgtgtgatattgctgaaaagtatcacggcgcatctaaaacatcaggcgctggtggtggagactgtggtattacaattatcaataaagatgtagataaagaaaaaatttatgatgaatggacaaaacatggtattaaaccattaaaatttaatatttatcatgggcaataaatgatttgataggggagcaatcatctaatttaattagaagataaatgctccattttttattgccagccgtgttacgtatcttgaaaaaaatattaaaaagagtaaaatagatagagttaacgaaaaaattaatgaaatcgacgatatagatatgataaagaaaggtgggtagcaatatgaaaaatacattccttatttgtgatgaatgtcaggcagtcaatataagaacgttacaaaagaagttggaaaaattagatcccgatgctgaaatcgtgataggttgtcaatcttattgtggacctggacgccgaaaaacattcacttttgttaataaccgcccactggctgcgcttactgaagaagaattaatcgaaaaagtttctcaacaattaaagaaaccacgtgatcctgaagaagaagagcgtttaagaaaacgacatgaagaacgtaaacgtcgtaaagaagaacaagatagaaagcttaaagaaaaattagaaaagcgaaaagcacaacaataaagcctgatggcagcatcattcaatgcgtgccaccaggtttttatgttttgtctagaaattaaataaatcattaaatgattcggccatcgtaggatgcgtataaatattatctcgtaatacggtatatggaatgttttgatcaatcgcaagtttaattatattaattaattcttcagattgcttaccatataatgtagcacctaaaatcatattattttcattattaatgactactttaaataaacctcttggatcattgttaattttgtgacgaggtatagcacttactaaaagttgatgttcagtgtaatcataatgttgagcggcagcttctttactagttaatccaacacgtgatagtggtggatctataaatactgtataaggcacgctgcctctattgtcagtcgtacgtgactgattaccatataacgctgatttgataattcgataatcatctaaagatatatacgtaaattgaagtccgcctttaacatcacctgcagcataaatatgcggcacagttgtttgaagatgagcattgactttaatttcgcctctgtcgcttaattcgatatcagtattttctaaagctaaatccgcattcggtttgcgcccgatagccaaaagtactgcatcagcctcaaagttaccaacgttagtatggacagttgtatgataattgtcagatgacaattcagtcgtttcaacatttgtatgcaatgcaatgcctttattttctaagtcagtaatagcatgtgcaacgacatcttgatcttcgcgtggcataaatgattcaccacgttctaatactgtaaccttactacctaaattcgcaaacattgaagcaaattctaaggcgatataaccgccacctacaataacgagatgcttaggttgatagctaatgtttaataaacctgttgaatcgaagacatgtttagcttgatcaaggcctttaatgttaggaatgacagaggtagcaccagtattaataatgatatgaggtgcagtaatactatcggcgatatcgccatgttgatctaataaattcacttcagtattagatttaaactgcgctttaaaatccagtacatcaatgttactgtcgtctgctaataagtggtaatttttattgtttagcgcattgacaacatcgtttttacggttataacttgcttcaaaggttttgccttctaatccatcatgtacaagtgttttcgaaggtatacatcctatattgatacaagtgccgccatacattttcgaagattgttcgataactgcgacgtgttgacctgttgatgcagcgtatttcgctaaagttttaccagctttcccaaatcctattacaattaaatcatatgttttcatgacataaatcctccttttgaatgtcttcaatgacatctttgattgttttttctttataaaaattaataatgatattctgttcgtcttgttgataatgagacatggtagttgcaatattacgagcaatttgacagtgactgccttcgtcgccagtaaatagtcgtgtgtgatgttctttctctaagacaaaatgtttatataatgttgctaaagagacatcagcgctatgatcatttgctaaatatccaccatctttaccccgtattgtgttaatcatttttaaatcgacaagttgagtcgtcacgcgtcgtaattgaacaggatttaaacaagttaattctgctaatgaactactattgaatttttctgaatgatgcttagttaaaaaagctaatacatgcacggcaatgttaaattctaaattcaatgtttctcacctcataattgtaactatattagttacaattaaaaatcattttgctcaatgtgtcaatacttatgtttgagaactattgaattaggcgtgtttattgtgatgatttattgtttgaaagttgttgcattaacggtgagattgcacaattgaaattttagttatgtatgaactgatagatatgaaatgaatattgaaaatgagggcaataaaactttgaatgatgatgttgtgtgattttgtaaacttgctcgtattttagagacgttttgatattttgcatgatgaggaagtattttcaacaactggtgacatatttaaatcgtaaatatattttgagatattaatatatattagattaaggatgttgtcgcaataaaattaaaatattgaaagataatttttattgattaattgcgaatatacaaagacaccattatatccatatgctaaaataagaaaaaaggcgacatgttatctcaattcacctgcatctagactcctttacataagaaataatcatcgccgagttttaaaattttacaactttgtagatgtaaaaagcatttgattttaaatagtttgaaaatcatatatttttgaaaaaggagcatgccgatgagtattgacatgtatttagacagatctcgaaaccaagcttcaagtgtgggtgatttgagtcaaacaatgaattcaaattatgatgcgttggaaaaagcaattactcaatttatcaatgatgatgcgcttaaaggtaaagcgtatacgtcagctaagcaattttttagtacggtgttaattccattatcaacaagtatgaaaacattgagtgatttaacgaagcaagcttgcgataattttgtgtcacgttatacgagtgaggttgatagcatatctttaaaagaatcagagcttgaagaagatatcagatcattaagtcaacaaattacgcgatatgaaaatttgaataacaatttgaaaaagcatgcttccgataatcagcaagccatttcatcgaaccaacaaataatacaaacattaggtcaacaaaaacatgaattagaagagaagctacgcaaattgcgtgagtttaatcaaaaatcaccagaaatatttaaagaagttgaagaatttcaaaaaattgtccaacaaggacttacccaaacgcaaaatttttggaacttttcaacaaatcaatttaatattccttcaggtaaagaacttgattgggccaaagcaagtcatgaaaaatatttgaaagttgctatggggaaaattgaacaaaaagcagagaaagaaactttaaataaagcagactttgctgttataaaggcatatgccaaagaacatccagaagacgatatcccgaaaagtataatgaaatatataaatgacaataaagatagtattaaacgagatataggattagatattacgtcaacacttttagagcaaggcggtataaatgcaagtaaattcggtgtatttatcaatacagcaggtggagttaaaggcccagccggtccaaattcatttgtggaagtcaaacgtacatcaggtaatgtgtttatagaaaatggtagtaaatttgcaaaaggcggaaaatacctaggcaaaggtgttgcaggtgtaggatttggtataggtatgtatgatgatcttgcaaatgatgataaaacatttggtgaggcgttgtcgcataatgctttaactacaggaataggtactggtgctggaattgctattactgcagcactcgcgactaatccggttggatggacagtattagctggttttgctgtaggtacactttttacatttataacagattgggcttatcaaaataatatagctggtataaaggataaagcagactgggtaggacataaaatagacgacggtatcgatgttgctaaaaaatctacagaaaaagctatagatagtgttgggaatgttgttggtcaagctacaaaaagtatttctgatcatataaaccctatgaaatggagctggtaaatattgctttgtgaaactgaaaatattaataaaaatcccaaatataaaattatcaaatacaaagatgaatatttgatgattgatttagtaagcacatggttagcactctttttcccaatgattaattggctgattccaaaaaagtacgtcaaaatcagcgaaaaagattttgaaactttaaacattgtgaagccaactaaaatcaattctttttggccagtggcaggaagtacggtcttatttggtgttatgttaagaaggtattcccatttatttatcgttaaatatgaatatagtatagtaattttaatttgttgcatcataatactaggtatttttctgttttttctatatttaaatcaaaagttaaagttacaaatctataatgaaaacaaaaataaaagcaataagataatcatatttcccactttaaagagtctttgtttatcaatagttttatatatttatttaggtggtggttcattatttactatttatatgttactgatgattgaagttcaaaatataatattatttataactttgtttgtaatatttctgtttttcttatttttaaatatgtgctcactatatgacaataaagttcatgtattatttaaatcaaatgaaattgaaaaattttaataagaataataaacaaaggaatggtagtgataagtattgctatgcgaatctaaaatcatcaataaaaaaccaaaatatagaattattaaatataatgatgagtacttaatgatcgatataataagcacttggattagtttattttttccttttattaattggttcatccccaaaagatacgtcaaaattagtagagaagagtttgaaaatttaaatattgttaaacctgctaaaaagaatgttttttggccagttgcaggtatctctactttattcgcagttacattaagaaagtatacgcatttacttgacactcaacttgataaaaaattagttattgccatatgttgcatcacatttatagggattttaatattttatgtacgcctaattaaaaaatcatctttaaatatttataatactaaaaataaaaggtcaaaaatttttttaatacctacactaaaaaatttttgtttcacattgttcggatatgtttttttaattttttggacagtgattttctcatatgctctattatcaatgagttaccaaaacataatagtatattttgcttggattgcagttataatgtttttttttctagtgaatatagctttaattatagataaaaacattcatgtcatacttaaaaattaaatgaaagtactaaattcagattaaaaatatgaaaatatcaattaataaaacctttgatgacagtagcttgatagtatttgaatgtcttctgaactatgggaaaaagtattgcacataaaatcaaatggaagtgaagacattgctttgcgaatctagagttatagataaaaatgcaaaatatagaattataaaatacaatgatgaatatttcatgatagatttatcgagtaattacatatcttatctattgccaatgatcaattggtttatacccaaaaaaggagttaagttaagtgttaaagaggtagaaaaactagatactataaagcctcaaaaaaattcagctttaaattggtatataggattctctgtattattgactgtaatttttagaaagtatattagtttattagatttacaaattgaaaggtatataaacattagtataagtcttttgataattctttttatcattttgtttagattgtatataaataaaaagttaacaattaagagttttcatcaaaatgagtacaggactttagtgctaatcccgacatggaaaagctttatatttacgtcgtttgcttttgtctttataggattaatatcgatatttacaatcattgtcaccttttattatgaaaatcaaaacatcatagtatttttaactgaagttgctatgattctaatattctcttttttaaatgttttatcaatttctgactcgaaagtccatgtcataataaaagaaaatggcaaaagaaatatataaacaaacctttacttattcatttagaaggtatcaaaaaccgttaacaatcaaaacaacaacatctattaatgtagaagggtggttgtttttaaggataaaaagggcataatttataatctgagttaaagtactaaattcatattataaatatgccaataacaatgaataaaatttttaatggcagtaaattagtaatatttaaaagtcttctgaagtatagaaaaaatgtattacacataaaatcaaatggaagtgaagacattgctttgcgacgttgaagtggttaataaaaactcaaaatatagaattattaaatataatgatgaatatttgatgatcgatttagtaagtacctggttaactttatttcttccgatgatgaattggttaatccctaaaaaatacgtgaagattagtaaaaaagaatttgacgatttaaacattgttaaacctactaaaaatagagctttttggtcagctgtaggtggctcagttttatttggagttacgttcagaaagtatactcatttgctcgatgtccaactagaaaaaagtttagttattaccatatgttttataacattcttaagtattttaatcttttttatgaaattaaatcaaaaattaaaattaaaagtttttaataaaaataaagaacataaagaaaaagttatgctactacctactttcaaacatttttgttttgtaatattttcttatttattttcgggatttttttcaataatgagtctatgcatgttaataactttagattcacagaacataatagtatttattgcttggattataatgacaatgcttttctttctagtgaatatggcttcgataggtaataaaaatgttcatgtcatacttaaaaagcattagcaaacgctaaattcaaagtcaactgagttataacagaaactataaaaatccgcatattataaaggatatcaaacaataatattttaacttagcaatatattcaatattctaaattcatgagattagctgattaattgtttgaacttaaaaaggtatgaagtgggcgagataaaaatgttatgtgagtcctggaatataaataagaacccgagatataaaattataaaatataagaacgagtatttaatgattgatgtaactagttcttggattttctttttcattccaatgcttaattggggtgtacctaagaaatttgctaagattagtcaaagtgagtttgaagaattaaatacatttacaccgaaaaatagtagctcagctggatggatagcaggtgggggatcagttttattggcagtattgacgagaaaatatatacagttgttaaatatacaaattaatcaaattgctgtgaatattttatgctgtctcgtacttttgggggttttcctttcagctttatatattaattcgaaatctaagttaaacgtttatgatagaaataactgtgatgaaaagataattttaataccaacttttaaaaatttatgcttaatgcttctttcgtatattatttttggtggtataagcatacttgctttttatatgtttatcacagaaggtattcaaaacatcattttatttattacttggattatgcttgtaataatgttcttacttagtaatgtagctttggtagtcaataaaaaagtatatgttataaaaaggtagaaaaatgactaacaatattatgttaaccgttcttcaaataaagattactaagtaaaagtaggaagtgataaacagtgctttgcgaatctagagtcattaatcaaaaccctaaatatagaattattaaatacaataatgaatatttcatggttgatttagtaagtacttggattgcttattttttgcccatgattaattggtttattcccaaaaagtacgcgaaaattagtagaaaagaatttgaaagtttaaatattgtcaaacccgctaaaaataatactttctggcctgttgcaggatttgcagtgttattaacaaccttaacaagaaaatatatttatttgcttaatatccatttagaaaaagaaatagttatattaacatgctgtatgatacttctaggtgttttcgcattatttatatatataaatacaaaattgaagttacatatttttgataaaaataaaagtaataacgaaaagatcatattaatacctacatttaaaaatatttgtttatctttttttgcttatatattttttggtggattgttaacaatggctctgagtatgttagtaacttcatcccctcaaaatataatagaatttcttgctttaattggcatgactgcatgcttctttctactgaatatgtcatcggttttagataaaaatattcatgttattttaaaaacaaataagtagtaaaattgattaacttaggtagtatcggatacttaaatgttggtccataaaaagcaatgattttaaatcgaggagctatcttagaacagggaaataaaaaagccaaagttataaaaagcgaattaataactaattatattatgttagccactcttcaaataaaaaataattagaataaggtggaattgataatcaatgctatgcgaatctaaaatcatcaataaaaacccaaaatatagaattattaaatatcatgatgagtacttaatgatcgatataataagcacttggattagtttattttttccatttattaattggttcatcccaaaagaatatgtcaaaattagtagagaagagtttgaaaatttaaatattgttaaacctgctaaaaagaatgttttttggccagttgcaggtatctctgctttattcgcagttacattaagaaagtatacacatttacttgacactcaacttgatagaaaattagttattgccatatgttgcatcacatttatagggattttaacattttatgtacgcctaattaaaaaatcatctttaaatatttataatactaaaaataaaaggtcaaaaattatcttaataccaacactaaaaaatttttgtttcacattgtttatatatgtttttttattttatggacagttattttctcatatgctctattatcaatgagttatcaaaacataatagtatattttgcttggattgcagttataatggtttttttctagtgaatatagctttaattatagataaaaacattcatgtcatacttaaaaaccaatagaaattaccaaattgaatttgtaatggctttaatgttgtcgttcttaaatgatttttcaatttctgattcaaaagtacatgtaatttaaaggctaacgagcaatcgcgctatgtgaatttcaactaaagcaatacttattttaactgagttctacataacgtttttctaatacaccgcctaaattcaaaccctaattctaacatttggaagttgtattaaatcatggtagtgtgatagtggaaaagttataaagataaggagctgggtctaatgaagcaatttgtaaacttaggtaaatctgatgttgaagtgtttccaatcgcacttgggacgaacgcagtaggtgggcataatttatatccgaacttagatgaagaacaaggaaaagatgttgttcgtcaagccattaatcatggtattaatttattagatacggcatatatttatggaccagaacgttctgaagaattggttggagaagttgttaaagaatatcctcgagaacaaattaaaattgctacgaaagggtctcatgaatttgatgaaaatcaagaagtacatcagaacaatcaacctgaatatttaaaacaacaagttgagaatagtttgaaacgtctacaaactgattatatcgatttatattatattcattttccggatgacaacactccgaaagatcaagcagttgcagcattacaagagcttaaggaacaagggaagattaaagctattggtgtatcaaatttcacattagatcaacttaaaaaagcaaataaagatggttacgttgatgttgtacagttagaatataatttattgcatcgcgaaaatgaggcagtattacaatattgtgttgatcaccaaatcacatttattccatatttcccattagcatccggtattttagctggaaaatatgatgagaacactaaatttagtgaccatcgtactacacgtcgtgattttaaaccaggtgtatttgaagaaaatgtgcgtcgcgtaaaagctttggaaagcctagctgcagcacatcaaacttcaattgcgaacattgtattagcattttatttaacgagaccagctattgatgtgattattcctggtgcaaaacgtgcagaacaagtcattgaaaatattaaagctgcagatatcgttttatcagatgatgagattcaatatatcgatgaactgtttccaattgaagactaaatgaattgtatttaatggtgacatatgtatctaattcatcatgaattagccccgtatcacaaacgacgttatataaggcatgacgaaatttcgtcaaatttatataaaagttgtaagcgttttactatccggtaggcaaagcttatgatagtataattaggtaacgaaaagcacagatatttattaatcaaaagtgaggttaggctaaaatgattactgttttgtttggtgggagtagaccaaacggtaatactgcacaattaacaaaattcgctttgcaagatttagagtatcaatggattgacgtgacacaacatcagtttaaaccgatacgtgacgtgagacatacaacagagactattacttcatatgacgatgactatttgccgattctagataaaatattggctagtgatacaattatttttgcatcaccagtgtattggtatagcatttcagcaccattgaaagcatttatcgaacattggtcagaaacattacaagataaacgatatcctaattttaaggcacaaatggctgaaaaggattttagagttattttagttggtggagattgtccaaaaataaaagcgaagccagcaattacgcaaatgaaatatagtttagactttttaggtgccactttaaatggttatattattggaactgctgaaaagcctggtgacatcatgaaagacaactatgccttagcacgtgcaactgagtggaatagtatattgcaataagacatacctcatactaaacgaagtgtattttttgcttcgttatttttttatttttaattttaacggaaaatataaatatataaattgaatagacaatcattgtttattaagtattgagcaagttgtggtataatgccgttattaaaacttgttaataaggggagaaagtcatgttcaaggtaagacaagcaactgaaaaagatgttgttcaaattagagatgtcgcaactaaagcttggtttaatacatacttaaatatatacgctgcgacaacagttaatcacttgttagaagcttcatataatgaacatcatttaaagaaaagacttcaagaacaattattcttagtcgttgaagaaggtaatgacatcgttggctttgctaactttatttacggtgaagaattatatttatcagctcattatgttaaaccagaatcgcaacatacaggttatggtacagcattgttaaatgaaggattatcacgttttgaagataaatttgaaggtgtttacttagaagtagataataaaaatgaagaagcagtagcttactataaagagcaaggttttacaatcttacgctcttatgagccagaaatgtatggcgaaaagttagacttagcacttatgtacaaagcattttaagtaaattaaatattatattaaacgaaaaggaggggaataatgactaacgcatatgtagatttaaaattagtagaagaaaaagtttttaaagacccgatacatcgatatattcatgttgaagatcaattgatatgggatttaattaaaactaaggaatttcaaaggttacgtcgaattagacaattaggaacactgtacctatcttttcacacagcagaacatagtcgctttggacattctttaggtgtgtatgaaatagttagacgattaattgatgagtcatttattggtcatgatgcatgggacaataaagatagaccgttggcattatgtgctgcattattacatgatttaggacatggtccattttcacatagttttgaaaaaatatttaatacagaccatgaagcatacacacaagcgattattactggagatactgaggtgaatgctgtattacgtaaagtatcgcctgagtttccaagagaagttgcggaagtaattaataaaacgcatcataataaattggtcatttcgatgatttcgtcacaaatcgatgcggatagaatggattatttacaacgtgatgcgtatttcacaggtgtatcatatggtgcttttgatatggaacgtattttaagattaatgcgaccttctaaagatgaagtgctaatcaaagaaagtggtatgcatgcagttgaaaactttattatgagtcgttatcaaatgtattggcaaatttatttccacccagttagtcgtggtggagaagtgctgcttaataattgtttgaaacgcgcaaaacagctttataatgaaggctatgaatttaagttgcatccacatgattttattccattttttgaagagacagttacgattgaacaatatgttgaactcgatgaagcggtagttacgtattatttggaaaaatggacaaaagaagatgatgccattttaagtgatttagcaagtcgatttattaatcgagacttatttaaatatattccatttgatggctcaattattacaatatcagaacttcaagaactgtttgaagcaggtggtattaatccagattattattttgtgagtgaagcattttcggatttgccatatgactatgatcgacctgggtcaaatcgtaaaccgattcatttattaagacaagatggtacgattagagaaataagcaatcaatctttagtcattcatagtattacaggcattaatcgccaagactataaattatattatcctagagaaatggttacaaagattaaagataagacaattagagaagctattgaaaatttgattaatgagcttaattaaacagggctaaaattgttatcgttaaatatggaggttatatcattgtctgagaaaaaaggctttaattttaatatcataaaaaatgaccctctagatggtcataaaggtacaaatattggttcaattagcttagacaatattgcaccagtttttatcgatgttgctaacaaagaagcatttattgatattggaggcatgcatgctcgcgccaaagttgaaaaaggcgtgaaatggattactgataaagctgctgttgaaggcgatgaagctaaagaatattggttgtgttgggtaacaacagaacggaatgaacaaggaccatattatgctggtttaacagcgtgctatttattagtgaataaagcaattcgtcgtggttataaaagtatgcctgaacatgttaatatgatggataaatcaatgaaacatcatattatcattgatcaaattggtgacgagaataaagctattttaaaagactttttaatgaaccatgatgaaggtatgtggaagcattcttctgatgctttacatcaagcatttaattaaatattagaaactaaaatttcctaattaatctataaagatatgattcatttctcaatgacgacgtaaatcatgaggtgaaaataaagtcttagattgattgggagtttttttaatttttttgaaattaaattaatctgtagttaataaaaaatttgaataactgacacatttttttgatcatagctatatactttgtgaattaattcacattataataagagtgaagataagagtattataaattatctttaaataaatatatgtgaagtaaaaattacacgttagcatatcgattatgttatttcttttaacatattaactagggaaacgttaaaagttaacggttgatatctaactaaaaacaaagtcacagtagtatattttaatctggcgtctattacaaataaaaattacatctataattattcgttttcatttttgaaagtaatcgccaattaatatcatacatactggagtgactataaggaggacattattatgagagcagcagttgtaacgaaagatcacaaagtaagtattgaggacaaaaagttaagagctttaaaacctggtgaagcattggtacaaacggaatattgtggtgtttgtcataccgatttacatgttaagaatgctgattttggtgatgttacaggcgttactttaggtcatgaaggtattggtaaagtcatcgaagttgcagaagatgtagaatcattaaaaattggagaccgtgtgtctatcgcttggatgttcgaaagctgtggaagatgtgaatattgtacaacaggtcgtgaaacactttgccgtagtgtgaaaaatgctggttatacagtagatggtgcaatggctgaacaagttattgttactgcagactatgctgtgaaagtacctgaaaaattagatccagcagcagcgtcttctattacatgcgcaggtgtgacaacttataaagctgtaaaagtaagtaatgtaaaacctggacaatggttaggtgtttttggtataggtggtttaggaaacctagctttacaatatgctaaaaacgttatgggggctaaaattgttgccttcgatattaatgatgataaattagcattcgcgaaagaattaggtgcagatgctattattaattctaaagatgttgatccagttgcagaagttatgaaattaactgataacaaaggattagatgcaacagtggtaacttcagttgctaagacgccatttaaccaagcggttgatgttgtaaaagctggtgcaagagttgttgctgttggtttacctgttgataaaatgaacttagatatcccaagattagtgcttgatggtattgaagtagtaggttcacttgttggtacaagacaagacttacgtgaagcgtttgaatttgctgctgaaaataaagtaacacctaaagttcaattaagaaaattagaagaaatcaatgatatttttgaagaaatggaaaatggtactataactggtagaatggttattaaattttaaaaatatcaactgactatatagataaagaaggtagtgctctaaacactatcattataatcaaacacgaggttttcatgtaagatggtgaaaatctcgtgttttttggttttgaggtgttgtttgtattttataaaatggcttaaatatatgaagtattgattaagtatggaattgttaattaaatgaacctatttagctttaagaaggcataacaagatgaccttattttatgctataatatttctattatgcgaagattaaggtgagtagtaaattggataaaaaagtaaatattcatacaaagcaagtgttgaaacagcacaacgaaaaagaaaaatttgaatttactactgaaggaacttggcaacaaaggcaatctaactttattcggtatgtagaacaaattgaggatgcaacagttaatgttacaataaaagtggatgatgatagcgttaagttgattcgtaaaggcgacattaatatgaatttgcattttgttgaaggacaaacgacaacaactttttacgatatatcggctggacgaattccactagaagttaaaacattacgcattttacatttcgtaagtggagacggtggcaagttaaagattcattatgaattatatcaagataatgaaaaaatgggttcttatcaatatgaaattaactataaggagataggcgaatgaatattattgatcaagtgaaacaaacattagtagaagaaattgcagcaagtattaacaaagcaggattagcagatgagattcctgatattaaaattgaagttcctaaagatacaaaaaatggagattatgctactaatattgcgatggtactgactaagattgcaaagcgtaatcctcgtgaaattgctcaagcgattgttgataacttagacactgaaaaagcacatgtaaaacaaattgacattgctggtccaggattcattaatttttacttagataatcagtatttaacagcaattattcctgaagcaattgaaaaaggtggtcaatttggatatgtaaatgaatcaaaaggtcaaaatgtattgcttgagtatgtttcagctaaccctacaggagatttacatattggtcatgctagaaatgcagcagttggtgatgctttagctaatattttaactgcagctggctataatgtaacacgtgaatattatattaatgatgctggtaatcaaattactaacttagcgcgttcgattgaaacacgtttctttgaagctttaggtgacaatagttattcaatgccagaagatggctataatggcaaagatattattgaaataggcaaagatttagcagagaaacaccctgaaattaaagattattctgaagaagcacgtttgaaagaatttagaaaattaggcgtagaatacgaaatggctaaactgaaaaatgatttagcagagttcaatacgcattttgataattggtttagtgaaacatctttatatgaaaaaggtgaaattcttgaagttttagcaaaaatgaaagaattaggttatacgtatgaagctgatggcgctacatggttacgtacaactgattttaaagacgacaaagacagagtattaattaaaaatgacggtacatatacgtatttcttaccagatattgcgtaccacttcgataaagttaaacgtggtaatgacattttaatcgatttatttggtgctgatcatcatggttatattaatcgtttgaaagcatctcttgaaacgtttggtgtagatagtaatcgtttagaaattcaaatcatgcaaatggttcgtttaatggaaaatggtaaagaagtgaagatgagtaaacgtactggtaatgcgattacattaagagaaattatggatgaagttggcgttgacgctgcacgttatttcttaactatgcgtagtcctgatagtcactttgattttgatatggaattagcgaaagagcaatctcaagacaatccagtttactatgctcaatatgcacatgcgcgtatttgttcaattttaaaacaagcgaaaaagcaaggaattgaggtagctgctacgaatgattttacaacgattacaaatgaaaaagcgattgaattgttgaaaaaagtagctgatttcgaacctacaattgaaagtgctgctgagcatagatcagcacatagaattactaattatattcaagatttagcttctcatttccataaattctataatgctgaaaaagtgttaacagatgatattgaaaaaacaaaagcacatgttgctatgattgaagcggtcagaattacattgaaaaatgcattggcaatggtcggtgtaagcgcacctgaatcaatgtaagaacatttatatacactccaacgtagagtttctcgaaagatactttgtgttggagtgttttttattaggtatgtgacatattgggaatgcttagtatgtgaataaggttaaaggaatacagttggcttgcttgcgcagcaactgcataagagcccctaatcgctaaagctcaaggggctctaaaaggaggatgtaaatgttaggaactgatgaattgtataaattgttatataggcatatgggacctcaaaattggtggcctgctgataatgacattgaaatgatgttaggtgcaattttggttcaaaatactagatggcgaaatgcagaaattgcattgaatcaaattaaagagcacacgcattttaatgcaaatcatatattagaactacctattgaaacgttacaatcattgattcattcaagtggtttttataaaagtaaatcactgacgattaaaacattattaacatggttagcacgacatcatttcaattatcaagagattaatgagcgatataaagctgaattaagaaaagaattattatctttgaaaggtattggaagtgaaacagcagatgtcttacttgtttatatattcggacgtattgaatttattccagatagctatacaagaaaaatatatgataaattaggatatgaaaacactaaaagttatgatcaattaaaaaaagtagtcacattaccaaatcattttacaaatcaagatgctaatgaatttcatgctctgttagatgtatttggtaaacattactttagagataaagatataaagaattatgattttttagaaccttactttaaaaagtaaacgctgtgaagttagatagatgagtttatatgaaatataaaaaataatttactattttcttttagtatgtggacttatataataaatagaagcatataaagaaaaaaagttgtttgtttgtgcagtaactgcataaatccctctaatcgctaaagcgaaaagtgggattaaaaaggagatgtgataatgtgaagaaatcgttaattgcttttattttgatttttatgcttgttctgagtggctgtggtatgaaagataatgataaacaaggtagcgatgataatggctcgtctaaatcgccgtaccatagaattgtttcgttaatgcctagtaatactgaaattttatatgaattaggattaggtaaatacatagttggtgtttcaacggttgatgattatccaaaagatgtgaaaaagggtaagaaacaatttgatgctttgaatctaaataaagaggaacttttaaaggcaaagccagatctaattcttgcgcatgagtcgcaaaaggcaactgcaaataaagtattgtcatcattagagaaacaaggcatcaaagtagtgtatgttaaagatgcacaatcaattgatgaaacttacaacacatttaagcaaattgggaaattaacgcatcatgataagcaggctgaacaacttgttgaggaaactaaagataatatcgataaagtcatagattcaattcctgctcatcataaaaaatcaaaagtatttattgaggtttcatcaaagcctgaaatatatacagcagggaagcatacatttttcaatgatatgttagaaaaattagaagcccaaaatgtttatagtgacattaatggttggaaccctgtaacgaaggaaagtattattaaaaagaacccagatatattaatttcgacggaagctaagacaagatcagattatatggatatcatcaaaaaaagaggtggattcaataaaattaatgctgtcaagaatacacgtattgaagttgtaaatggtgatgaagtgtcaagaccaggtccacgtattgatgaaggattaaaagaattaagagatgcaatttatagaaaataaaccattctaattataccccttattgctacatgtaataaaaattacatgtttgagataaggggtttttaaaatatatttagtgaatgatagcaacgcgagtatgtgattgctataatgaatgtaattatcgatgaaagaaaagagaatgctatgacatttaataaagtattattgagctggatagtcatattgattataacaactagcatatatctattttggcagttgggggatatcaatgatgtatttaaccagtctattttaatcaatgttagattaccgagattattagaagcattgttgacaggtatgatattaactgttgcaggtcttatatttcaaacagttttaaataatgcattggcagatagctttacattaggattggcaagcggtgctacatttggttcaggattagcattatttttaggtttaacaacgttatggattcctgtattttcaataacatttagtttgataacattaataactgtattagtcattacgtcggtattgagccaaggatatccagttagaatcttaatattaagtggtttaatgattggtgcattattcaattcacttctatattttttgattttattaaaacctcgtaaattaaatacaattgccaattatctgtttggtggttttggtgatgcagaatactcaaatgtatccataatagcaatcacatttatcattgcactgtttggtatatttatcattcttaatcaactaaagttattgcaattaggagaactaaaaagtcagtcactaggcttaaatgttcaaataattacatatatcgcgttatgtatagcttctatgataacggcgataaatgtcgcatatgttggcatcattggattcattggtatggtgataccacaactcattagaaaatggcagtggaaacaatcattaggaagacaattggctttgaatattgtcattggaggacaaataatggttatggcagattttattggtagccatatattgtcaccaatacaaataccggcaagtattatcattgcattaattggtataccagtgttattttacatgctaatatcgcagtcgaaacggttacactagcacatgacttttgctaaaataaaaataactataaacataaagagggcataagcgatggatttgaatcaaattaaagcagttgtatttgatttagaaggtacgttgttggacagagttaaatctcgagagaaatttatcgaagagcaatatgaacgatttcatgactacttaattcatgttcaactagcagattttaaaaaagcatttattgagctagatgacgatgaagataatgataaacctgatttatataaagaaatcattaaacgtttccatgtagataggctaacttggaaagacttatttaatgattttgaaatgcatttttatcgttatgtatttccttattacgatactttatatacactagaaaagctatcgcaaaaaggctttcaaattggtgttatcgcaaatggtaaatctaagattaaacaatttcgattacattcacttggtttgatgcatgttattaattatttatcaacatcagaaacagttggttttcgtaaaccacatcctaaaatttttgaagatatgattgatcaactaggggtattacctgagcaaattatgtatgttggcgatgatgcgttaaatgatgtagctccagcacgagctatgggcatggttagtgtatggtataaacaagaagatgctgaaattgaaccactcgaagaagaagttgattttacaattacaacagtggaagaattattaaccattttaccaataaaaaatgataataaaggagaaaattatggatctatttactagaaaagatggaacatcgatacattacagtacattaggtgaaggctatcctatcgtattgattcatactgtacttgataattattctgtgtttaataaattagcagcagaattagcaaaatcatttcaagttgtgttaattgatttacgtggacatggctattctgataaacctcgtcacattgaaataaaagatttttctgatgacattgttgaattacttaaatatttatacattgaagaagttgcatttgtatgccatgaaatgggtggaatcattggtgcggatatttcagtacgttatcctgaatttacatcatcacttatgttggtaaatccaacatctattgaaggtgaattaccggaagaacgtttatttagaaaatatgcccatattattcgaaactgggatcctgaaaaacaagataaatttttaaataagcgtaagtattatcgtccgagaaaaatgaatcgattcctcaaacatgtcgtagatacaaatgaaatatcaactaaagaagaaattcaagcagttaaagaggtattcaaaaacgctgatatttctcaaacttatagacatgtcgtagtaccgacaaaaattattgcaggagaattcggtgaaagaacaacaagattagaagctaaagaagtagctgatttaatccaaaatgcggaatttgaagtatatcaagaatcaagtgcattcccatttgttgaagagcaagaaagattcgtcgcaggtacagcttcatttatcaacaaacatcacgatgaaaagcatgtttaatttttagtgataagtgaaatataaaagtagtaattattatttgtaatataattgtaatatgactgttgttttagaaatgattgttgtataatggttgtgagcacaagacgatataaataaaaggagagagtgcttatgaaaaagctactaacggcaagtataattgcatgttctgttgtaatgggagtaggcatagcgaacactagtgccgaagcagcaagtggcaactctattgatactgttaaacaattaattaagggtgatcagtcattagaaaatgtgaaaattggcgaatctattaaagatgttttaactaagtacaaaaatccgatgtattcttacaatgaagatggaactgaacattattacgaattccatactaaaaaaggtatgttattagtaactactgatggtaagaaaaacaatggtaaagtaactcatatttcaatgatgtataatgatgctaatggtccaacatatcaagctgttaaaaattatgttggaaaagcagtaacacatacggaatatagcaaagttgctggtaattttggatatattgaaaaaggcaaaacgacttatcaatttgcctcagcaccaaaagataaaaacataaaattatatcgtattgatttggaaaaataataattaaattaatcgtgcttaaccgacaagttaaatcgcaatacttgtcggttattttattacatggcataatacagtgaatataaatttttatgatttgcgaaggggatattaaaccaatacaataaataaagatgtttcattttaaaggagtactaccaatgcgtattaatgataaaattttactagaaaatatagaagattactttaatcataaaggtttatcaccgcatttgattgatgatattaaagagaaagtaattactgatataaaaaattctgaaaagaaagatcaagattatattgaatataaaagaaaatctccagcacaaatcatattaatgattcaaaggaatttgtttgctttacaaatgaatccagttattttctttattataaacttcattctcatatcctatttatatgataaacagtatgttcagtttcaagctattactggaatgagtctattttattgtttagtgatttttccaatgactattgttgtatacctaagggtgtctcaaaagaattacttgcgtagtaataaaatagaaatgattatgggtacaattatcgctatcatatccttgttattaattatattacaagcatttaatattacttggggcgttataccaattacaaattttggacatcaatttttctttttcattggtattattttagtaattgccggcatattttataagcgacttgagttttcgggaatcggcttattattttgtcaaaaaaccgtcgatgcaatgattcataatccacaatcagcccagattttttcattaattatatggatattattagtagttctagttatatatttcacaattagattatcttcacgtacaagattataaatatgataaaactattcacttgattaattgtattaattgagatgaatagtttttttattgttggaataactttttgtaatttataaataatttaaaaaaattgtttataaaatggaagcgtatatagaatgaaggttgggtatatagtttattgagggaggtgtcacaatgaataaagtcacaattaatcctcaaatccaattaacttatcaaattgaaggtaaaggggatcctataatattacttcatggattggatggtaatttagctggatttgaagatttgcaacatcaactagcatcatcatataaagtacttacttacgatttaagaggtcatggcaagtcttctaaaagtgaatcatacgatttaaacgatcacgttgaggatttaaaaattctaatggagaagttaaatattcatgaggcacatattctaggacatgatttaggcggggtagttgctaagttatttacagataaatatgcttatcgtgtaaaatcattaactaccattgcatcgaagaaagatgacttaatacacagctttactcaattgttaattcaatatcaagatgatatagcgggttttaataagtctgaagcgtatattcttttattttctaaattgtttagaaatcaagagaagacgatgaaatggtatcaaaaacaaagaatatatagcattaagtctgaggatgatagtgcggtggcaattcgttcattaattttgcataaagatgaacctatgtatttaaaaaaacgtacatgtgtacctactttgttaattaatggggaacatgatcctttgattaaagataagaatcattttaaattggaagcgcattttttaaatgtaacgaaaaaaatcttcgaacattcaggacatgcaccgcatattgaagaaccagaagcatttctaagttattatctaaatttcttaaaaagcgtatcataatatttgatatataaacctagggcataaagtccttaggcaatgtgaaaaagctgattactattaattatttgatagaaatcagctttttttgaaatgtatttgatatatatactgctcgttaagcggctatcttccttatattaagtgccattagtgcaaaacctcttaacaattaggtaaaaagagcataaaaaaaggaagtttaatagaatgtatcatctatcaaacttcaccaaattgcgctaaacaaaattatagttcaatttcgttgtttgcttcagtgattcgtttatttactcgactcaataatgattcgatttttttacgttgttgtgcattaacaagaattaatacagttctttcatcatgctcattacgttttttatcgaagtaatcttcttgagataaaattttaactgctttaacaacttgtggttgtttgtagtttaaatgattaataatatctttaagatagtattctttctctttgttttcgctgatgtatgtcaatacagcgaattcttcaaagctaattgaaaattcctttttaattaaactttttaatttgtcagcataagtgaccattgataacaactcaaagcaatcattgatttttgtaattgccatgtttaaaacctccctatttgatgcatcttgctcgatacatttgcccgataatatattgatatctaatctttatttattatagatatgttagtcataattttgcattaaataagttttattaaatatatttaatgctctattatttagttaattataactaattaaaaatgagaagtaaacaaaaaagtgtttataaaacaaattattcattagacacagtgattgtatttctgggttagcatttggtttagtcaaaaatatcagcattttttataatttaccttaatttaatcgtcaatacaaggtaatttatttaatgaaacgatttagcgcaattaaatgtttcgatattcaatgtgtatctaaagtgattctttgtcatagcttaacgctttcaagttaacttcttctaatatttatacccatttttcgaacttccatcactaaaaaagaaaaatttttataatttttttaatttagtaattcccagtgcagttttaatgataaggaaaatacactattttaatgacaaaagtaaaactatagcactttaaagtaaatgtatagtaatccgattgataacaagtaatcaatattagaaagtacgattatggttcataatttaaagcatcttcaatctttaaagtcgactcaatgaatgaattaaagttgtacattttgacttatttttaattaattgaataaccaactatgaaatattagcacgaataacataatttttgctattaatttggtgtaaattattaaaaaataacattaatttaggtcttaagaatgagttgactatcgaatttgctaaattaaaatttgttgtgtcaaagcatactacccatattaatacttattaaaattaatttagaccacaaaaaaatagcttatcacttttaaaaataattacaagttaaaatgataagctgaatgttaaattaaaataatcttaaaagtataatgcctgtcaaaatacataatagaccaatagtttttctggatgtcattgctattttaggtgaaccaaataatccaaagtgatctatcaatatgcccattaaaatctggccaaacatcccaataagtgttgttaatgctgcacccatatgaggcattaagataatgttagctgttacaaaagccatgccaagtataccgccagtaaaatagataggttttaatttaccgaattttaaatgacttgtttttagttttaaagaacgattaaaaatagcggttaaaatcaatagcgttattgacccaattgtaaatgatactaatgatgtaaaggctggtgaatgagtatgacttgctaaagcactattaattgtcgtttgaataggtggaaagaaaccaaaaataaatcataagagaaggcaaaacagtaaatacttttgatcagttagtaataaattattcttgttaaattgattcattgggatgataccaacaattaatagtagtactccaattgctttaattaaattaaaatcatgaactgttgcaccaaataatccgaacgtatcaataatgacacccattataatttggcctgcaactgttgcaatgacagttaatgttgcacctaattttggcaataacaataaattgccagttaaatagccaacaccgagtaatacgccaacgaaccaagtatagtcgaatgtttgattactaaaaaagtgtaatgagaaaacgtcaggatttataaaaatatttaagacgattaagcatatagtaccaactgaaaatgaaatgaatgaagtatagaaaggcgatttagtatacagtgatagtcttgaattgacagatgtttggataggaataagcattccaactaggacaccaatgatatagaaaagaagcatatgaataaagtctcactttccaaagttaataataaaatcatatgtatacattatcattatagagaaaatatacaactcatttataataatgttgaaaaaagcaggacattaacaaaacaaaatcaccctagacaatcatgatgaaagtctagggtgttagtatttatactaaattaattgcgttttctttatatctatttcttatcttcaaataaaacagttgttgttttatcaataatttgagctgaatgtactttggtgatggtaccactatttgactttataatatttaaatctactaatgcattcatactatcacgtgcaacttgctcggtcactacgttgtttaattgtggtaattgcagttttacaggcttgtctagtgaagatttaaaacttaattcaagtgttttagtcatgaatatgtcctcctgattaaattgataaagatttgatgagttcgatattgctatatgtttccccagtaagtcgctcaataagtttgctgaatgttttaatttggtcgtttgatgcatcagggttaatgttggcgaatcgacgcttaaattctgtttgtttgccgttagcgtctacttttgtaaatgataatacaatagtgatgtggtttattttactcatattttaaaacctcctttcacactatatatcgaaacaaaataataaaatggctaattttattttctatgtttaaaatctataaaaaaggcaatagatatatgtaactaaaatataaaatagctatgattaagacacttaaagcaagtggaggttgagtaatgaataaagtagaagcgattaaatttaatgatgatattgttaaaatgtatgaagcgctcaagataaaatctgaacgtgactatttattctttaagttagctatacatagtggattgaaagtatcagaattattaacaattacagtctctcaagttaagagactaattgaaaagtgtacgttatcagaaatgtgtaaagcacattttcattcgttgattaaaattaggttaccagaaacattatcgaaagaactacttcaatatatagaggacaggagtctttcgaatgaagacgttctttttcaatcactacgaacaaatcaagtattatctagacagcaagcatatcgaattattcatcaagcatcaattgaagctggcatagataatgtaggactaacgacattgcgtaagacatttgcatatcatgcttatcaaaaaggtatacctataccagtcattcaaaagtatttagggcatcaatctgctattgaaacactaaattttatcggtttagaaaatgagtgtgaacatagtatttatatttcattacaattatagaaacaaaggaggctaataatgagtttggtttatttattaattgccatacttgtgattatggcgatgatacttctaatgtctaaacgtagagcattggctaaatatgccgggtacatagcgttgattgcacctgtaatttcatctatctatttattgattcaaataccatcagtagctaaactgcaatatctttctacctctattccatggattaagacattagatatcaatttagatttacgtttagatggtttaagtttaatgttttctcttattatttcacttattggaattgcagtattcttctatgcaactcaatatttatcctctcgaaaagacaatttaccaaggttttatttttatttaacgttatttatgttcagtatgattggtattgtattatcagacaatacgatattgatgtacattttttgggaattaacgagtgtatcatcatttttattgatttcatattggtataacaatggtgacagtcaatttggtgcgattcaatcatttatgattacagtatttggtggattggcgttattagttggttttataatgctgtatatcatgacaggaacgaataacatcactgacatattaggacaggcagatcatattaagaatcatggattgtttatgcctatgatttttatgtttttattaggtgcatttacaaaatcagcacaatttccatttcatatttggctacctagagcaatggctgcacctacacctgtaagtgcttatttacattcagccacgatggtaaaagctggtatctttttattacttcgatttacaccattattaggtcttagcaatatgtacatatatatcgtaacctttgtcgggttaataactatgttatttggctcaatcacagctttaaaacaatgggatttaaagggaattctagcgtattcaacaatcagtcaactaggaatgattatggcaatggtcggtatcggtggtggatatgctcaacaccaacaagacgcaatagcatctatttatatatttgtgttatttgcagcattgttccatctaatgaatcatgccatctttaaatgtgcgcttttcatgggagtaggtattttagatcatgaagcaggttcaagggacatacgaattttaagtggaatgcgtcaactatttcctaaaatgaatctagtcatgacgatagcggctctatctatggctggagtaccatttttaaatggatttttaagtaaagaaatgttcttagatgcattaacacaaactggacaattatcccaatttagtttgatttcaatgatagctatcgtgtttgttggtgttattgcgagtgtttttacattcacatatgcactatacatggtaaaagaggtattttggacaaaatatgattctaaggtttttactaaaaaaaatatccacgaaccatggttgtttagtttaccatctcttatattaatggtgctagtacctgtaatcttttttgtaccaaatatatttgggaagtggattatcgttccagcattaagagctgtatcagctggtaatcatcaaattgatcaattggcaccacatgtttcgcaatggcatggatttaacataccgcttcttttaaccatcatcattattttattgggtagtgtactagcaatcaaagtagattggaaaaaagtgttcacgggtaaaatcagacagatttcagtttcaaaaagctatgagatgatatatcgacattttgaaaagtttgctacgaagcgatttaaacgtgttatgcaagatcgtttaaaccaatacattattatgacactgggcatatttatggtaatcatcggatacggttatattcgaattggacttcctaaagtacatcagttacatgtttctgaatttggggcattagaaattatattagcaatcgtaactgtcacaattggtatttctttaatttttatacgtcaacgactaaccatggtaattttaaatggagtcatcggttttgttgtgaccttattctttatagcaatgaaagcccctgatttagcattgactcagctagtagttgaaacaataacgacgatactatttattgtcagtttttcaagattaccaaacgtgccaagatctaacgctaacaaaaaaagagaaataattaaaatttctgtatcactcttgatggcacttattgttgtatcattaatttttattacacaacaaacagatggtttatcatcaatatcagacttctatttaaaagctgacaaactaacaggtggtaaaaatattgtaaatgcgatacttggtgactttagagcattagatacattatttgaaggattagtgttaattattactgggctaggtatttacacattactaaattatcaagatcggaggggacaagatgaaagagaatgatgtcgtgttaagaacggtcacgaaacttgttgtatttatattattgactttcggattctatgtcttcttcgcaggtcataataatcctggtggtggctttattggtggtttaatatttagttcagcgtttattttaatgtttctggcttttaatgttgaagaggttttagaaagtttaccgattgattttagaattttaatgattattggagcattggtatcatctattactgcgataatacctatgttttttggaaaaccatttttgtctcaatacgaaacaacttggatacttccaattttagggcaaattcatgtaagtacaataacactttttgaattaggtattttattttcagttgttggtgttattgtcacagtgatgttgtcgcttagcggaggtcgatcatgaatttaatattattactagttataggatttttagtatttataggaacatatatgattttatcaatcaatttaattcgtattgtaatcggaatttcaatatatactcatgccggtaatctcattatcatgagtatgggaacgtatggttctagtagatcagaaccattaataactggtggaaaccaattgtttgttgatcccttgttacaagctattgtactaactgcaatagttatagggtttgggatgactgcgtttttacttgtacttgtttatagaacttataaagtaacaaaagaagatgaaatcgaaggcctaaggggggaagatgatgctaagtaacttattgattttaccaatgttattaccattcctttgtgccttaatccttgtatttttaaaaaataatgaccgtatttctaaatatttatacttaggtacaatgactatcaccacaattatttcattaatgctattaatttatgttcagcgtcaccgtccaattacgctagactttggaggatggtcagcgccctttggtatacagtttttaggagattctttaagtttaattatggttacaaccgcttcgtttgtgattactttaattatggcatacggatttgggcgtggcgaacataaagcaaatcgttatcacttgccatcgttcatattatttttaagcgttggcgtgataggctcttttctaacatcagatttatttaatttatacgtcatgtttgaaattatgttacttgcgtcatttgtactcattacacttggacaatctgtagaacaattacgtgctgcaattatttatgttgtcttgaatattattggttcatggctattcttattaggtataggtttactttataaaacagtaggtacattaaacttttcacatattgcaatgcgtttgaatgatatgggagataatcgcactgtaacaatgatttcattaatcttcttagtcgcatttagtgctaaagcagcgctggtcctttttatgtggctacctaaagcatacgcagtgttaaatactgagcttgcagcattatttgcagcgttaatgaccaaagtaggggcctatgcattaattcgattcttcactctactatttgatcaacataatgatctcatacatccattgctagcaactatggctgctataactatggtcatcggcgctataggtgtcattgcttataaagatattaaaaagattgcagcttaccaagtcataatctcaataggatttatcattttaggtttaggaacaaacacgtttgcaggtattaatggtgcaatattttatttagtaaatgatattgttgtaaaaacattgctattctttattattggtagtttagtttacattacaggctatcgacaatatcaatatttgaatggcttagctaaaaaagaacctttatttggagttgcgtttattataatgatttttgctattggcggcgtgcccccatttagtggctttccggggaaagtacttattttccaaggtgcattgcaaaatggcaattatattggactagcgttaatgattattactagtctaattgcaatgtacagtttatttaggatacttttttatatgtattttggagataaagatggggaggaagttaattttaagaaaatcccactatatcgaaaaagaattttaagtattttagtagttgtggttatcgcaatcggaattgctgcgcctgttgtgttaaatgttacaagtgatgcaactgagttgaacacgagtgatcaattatatcaaaaacttgtaaatccgcatttgaaaggagaggactaaatgaatcaaatagttttaaatattatcattgcattcttatgggtattatttcaagatgaagatcattttaaattctcgactttcttttctggatatttaattggtttaattgtcatttatatattacacaggtttttcagcgatgatttttatgttagaaaaatttgggtagctattaaatttttaggtgtttatttatatcaattaataacatctagcattagcacgattaattatattctttttaaaacaaaagatatgaaccctggattactttcatatgaaacaagactaacaagtgactgggcaataacatttttaacaattttaattattataactccagggtctacagtaatacgaatttctcaagactctaaaaagttttttattcatagtatcgacgtgtcagaaaaagaaaaagatagtttgttaagaagtattaagcattacgaagacttaatattggaggtgtcgcgatgatacaaacaataacacatattatgattattagttcactcattatttttggaattgcattaatcatctgtttatttagattaatcaagggacctacaacagcagatcgtgtcgttacattcgatacaacaagtgctgtcgtaatgtcaattgtgggtgtgttaagtgtacttatgggcaccgtttctttcttagattcaatcatgctcattgccattatatcttttgtaagttctgtttcaatatcacgctttattggtggggggcatgtgtttaatggaaataacaaaagaaatctttagtcttattgctgctgtgatgttgttgttgggtagttttattgctcttattagtgcaataggtatcgtgaaattccaagatgttttcttaagaagtcatgctgcaacaaaaagttcgactttatccgtgttattaactttaatcggtgtattaatttattttattgtgaatacaggatttttcagtgtgcgtttattactgtcacttgtttttattaatttaacttcaccagtcggcatgcacttagtcgctcgcgctgcttatcgcaacggcgcttatatgtatcgaaaaaatgatgatcacacacatgcatcaatattattaagttcaaatgaacaaaactctacagaagcattacaattacgtgctaaaaaacgagaagagcatcgtaagaaatggtatcaaaacgattgaagtgttggctaaattgttaagcataacaatgcttttgaagatttgttttcaaaattaatcattaaatgagtactttgaaattggttagtcgattttaaggtgctcattttttgtattataagttaatgttgttatgtgaaagcaagttgtttatttatacaaacaattagtgataaaataaaattaaataattgcaaatttaagtactgcaatcgtagacatatatctatattaaagtgcttttgtggtcgctaactcaatttatcctctaaagtataattacaacgagatgtgatacttaattttcaattaaacaatactttttagagaggtgaaagtttggaaatatttgaaacaattcttatatttatagctgttgtgatactaagttcgtttgtccatactttcatacctaaagtacccctagcatttatacaaattttcttgggcatgttactatttattaccccaatccctgttcaatttaattttgattctgaattgtttatggtaacaatgattgcgcctttgttatttgtagaaggtgttaatgtttctagagtccatttaaggaaatatattaagccagtgatgatgatggcattaggattagtcattactactgtgataggtgtaggtttatttattcattggatttggccagacttacctattggagcagcatttgcaattgctgccattctttgtcctactgatgcagtagcagtgcaagcaatcactaaaggaaaggtcttgccaaaaggagcaatgacaattcttgaaggtgagtcattattgaatgatgctgctggtattatttcatttaaaatagctgttggagtattagttacaggtgctttttcacttgttgatgctgttcagttgtttttaattgcatcaattggtggcgcagtggttggtttacttataggtatggcattagtaaggttccgattaacattgatgcgacgaggatatgaaaacattaatatgtttacaattattcaattgttaacaccatttgttacgtatttaattgctgaattgtttcacgcatcaggaatcattgcagcagtagttgcaggacttgtacatggtttcgaacgtgacagaattatgcaagtacgtacacaactacaaatgagttacaatcatacatggaatatactaggttatgttttaaatggctttgttttttcaatactaggatttttagtacctgaagttattattaaaattattaaaacagaaccgcacaatttaatctttttaataggtatcactatagttgttgctttagctgtctatctatttagatttgtttgggtttatgtcttatatccttatttttatttagccatcagtccattccaaaaaatgatgactaaaaatgatgatgataatccaacgactgagaaaccaccaaagcgaagtttatacgctttaattatgacgttatgtggtgtgcatggaacaatttctttagcaatcgcattaacgttaccgtattttttagcaggacatcatgcttttacgtatagaaacgacttattatttattgcatctggtatggttattattagtttggtagttgcgcaagtattattgccattattaacgaaacctgcacctaaaacagtaattggcaatatgtcgtttaaagttgctagaatttatatattagaacaagttattgattatctaaatcaaaaatctactttcgaaacaagttttaaatatggtaacgtgattaaagaatatcatgataaattagcatttttaaaaactgtagagaaagatgacgaaaactctaaagaattagaacgtctacaaaaaattgcttttaatgtagaaacaaaaacattagagtctttagtagatgaaggacaaataacgaatagtgtacttgaaaactatatgcgttatgctgaaagaacacaggtatatagacaagcatcattaataagaagaatgattgtattattacgaggtgctttattaaaacgaagagtacaaacgagagtgaactcggcatcttcacttagtgttacggataacttaatggaattaaataaaattaataaattagtccattataatgtggttagtcgtttgtctaaggaaacaacaaaagataatacacttgaagttggaatggtttgtgacggttatttaatgcgaattgaaaacttaacaccatctaatttcttcaactcagcaagtgaagatacgattactaaaattaaattaaatgcattgagagaacaacgtcgcattttacgtgagttgattgatacagatgaagtatcagaaggtacagcgttaaaactaagagaagccatcaattatgatgaaatggttattgtagatagtatgacgtagttcttaattatgctaaaagggattgatgaaaaactgaatggcttttcatcaatcccttttattttaggtgaattgaatagatagttttaaactatacgaattgttaatatttgagatttaattgaaataagttttaaaaattggaggagatagattaatcgaagtcatttaaagatgaagataagtgcattcacaaaaaatagccacactcatatgacatcggatgagtgtggcttaaggatctatggggggaggaaaccatagatgtttactttgataggccagattaaatatcaaagtatgcgattatttatagcttgatgcaaaagtggtatgcctattaaaagttactgcacatagcttttaatattccgttcaaaggaaaggggcatacaattgaacaatctgtaatagtacttttaaccagctatgctaaaagtctagtagggagaacagttgtccaatcacataagaacctctaacttcgttagtacgattaagaaaagctttttagttagtatgtaatacaatttattgacgcgcgtgaatctcttttataagagtgtgtagggaatggcgttgtataaattgtattagaagaacttctaacgcatctctgtggttaaaagagatgaagggaacgacagtttaattaaaaccacataaagcttttaactttgctctttgatttaaagagtgataaatgtttacagtttaattaaaactgcataagaacttctagcttttctctttcgctcaaagagaagttctaataccaccatatcgtgcgatcgggaacggtatatatattaataggagggtaatatatatttaacgcacgatatgggactattagccttcgactttgttatgttgatgtgtggcctaaaatattggagataccaatattttaggttgcatcaacatcaattcatcttacttcattaaaacacagcgtgttatttcatgcttccgtgtacagtttcaatatttgatttcatcattttgtagtaagagtcacctttagtgccttctttaccgattgaatctgtgtacacttcaccaaagatatctttcttcgtttcttcagataaactttccattgcttttttatcaacacttgtttctactaataagtgttttaatttgtgctttttaacaaactcaatagcttgtctcatttgttcaggtgtaccttgtttttcagtgttaatttcccaaatataacctggtgtaataccgtattgttttgagaagtacttgaaggcaccttcacttgtaatcatggcacgttgttcttttggaatgtcattaaatttgtctttactgtcattatttaatttttccaattgagcaatgtatttgttaccttgcttttcataatctgctttatgttttttgtcgttatcgataaatgtttgttgaattgtttttacgtatttaataccgttatctaaacttaaccatgcgtgtggatcttgtttatctttgttgccttcttcaccgtttaaatagataggtttaacatcttttgatactgcgataacttttttatcttttaatgatttaccagcctgttctaaggctttttcaaaccaaccgttaccagtctctaaatttaatccgttgtataaaataacgtcagcgtcagttaactttttaatatctttaggtttaacttcatattcatgaggatcttgaccgacaggtacaatactatgaatatcgacgttgtctccaccaacatttttagccatatcatataaaattgaattcgtcgttactacttttaatttgccatttgacttatcactgctttgtttaccaccagtaccacatgcagcaactagaagtaataaggctaataataaaggtactaattttttcatgttaaacttcctcgtttctttctattcgtaaattttgtgaaaaataatgtgatgatataaattacaaacgtacaaagtacgattgtcgcaccactaggaatgttgtaaatatagctgtaataaagtccgacaattgaacttatgacacttattaaacttgctataatcatcattgagtatagttttttactaattaaaaatgctgtagatgcaggtgtaattaatagtgcaactacaagaataatacctaccgtttgaatacttgctactgttactaatgagagtaacaacatcacaaagtaatgtaataacgtcgtatttagaccactcattctactaaacgttggatcgaatgtagaaatcattaatggacgatagaaaataatgattagaataaggacgattgaaccaatcacaatagttgttaaaaatgcactatttgtgattgccagtaaattaccaaacagaatatggtacaaatctgtcgtagtgtttattaagctaataataataatccccgaagctaagaaagcggtaaaactaattccaatagcggcgtcaggtttcgttttactactagatgtgatataaccgataaaaatacttgcgatcataccagttataagtgcgcctataaacattggaataccaaataagaatgatagggcaacaccaggtaatactgcgtgactcattgcatctcccattaatgaaagaccacgtaatacaattaaactaccaactgtaccacaaactatccctacaataattgaagttatcaatgctcgattcaagaattgatatgtaaataaatgttcgacaaactctaacatgttatattgctcctttgactagggtcactacagtcagtgctactcataaatgtttcgtttaagcgagtgacactcatagcctcttcactatcaccaaagtatcgtaatgtttgatttaatagaataatgcgatcaaagtattgctttgcttttgataaatcatggtggatgataagaataagttttccttgttgttttaagttctcgatttttgtcatgattaatttttcgctactaaaatcaattccgacaaacggctcatctagaaaataaacttcactttcggacatcaatgctcttgctactagcacacgttgtaattgtccaccacttaattctgaaatttgtcgatgacgtaaagattctaattctaaatcgcttaataactgtttgagtttatcccttgctgatttattaggtcgtctaaaccatccaatttctttgtagcaacctgataaaatcacttgttccacacttataggaaaatctaaatcaatatgtgctttttgtggaatatatgtaatatgttgcagttgttgttgtataggtttgttatataacaatttagtaccggtagcattaaattcaccaattaaagacttgataagggaagatttaccagcaccattcgggcccatgataccaattatttcgccgcgtactggtatcgataaggaaatgtttttaagtacatgcttattacctaaaaacagatttaaatcttttgtttctaacaaacgtttatacctcctaattaaaagtttaggctaacctaattaattgtataataaactgagaatatttatcatgtcaagtaaattcgtgatataatatagacaatgtatgtgaggtgaaagtatgttaactgaagaaaaagaggactatttaaaggcaatccttacgaataatggcgataaaaactttgtgacaaataaaatcttatctcaatttttaaatattaagcctccatctgtaagtgaaatggtaggacgtcttgaaaaagcaggctatgttgaaacaaaaccgtacaaaggtgttagattaacagaggatggtttaacgcatacgcttgatatcattaagagacatcgactattagaattatttttaatagaaatattgaaatataattgggaagaagtacatcaagaagcggaaattttagaacatcgaatttcagatttatttgttgaaaggctggatagcttgttaaatttcccagaaacttgcccgcacggcggtgtgattcctagaaataatgaatataaagagaaatatataacaacgatattgaattatgaacctggcgatatcgttacaatcaaacgtgtgagagataagactgatttgctaatatatttgtctagtaaagatatctctattggtaatgaagtggaaattgtatcgaaagatgaaatgaataaagttattatcatcaaacgtaatgataatgtaattattgtcagttacgaaaatgcaatgaacatgtttgctgaaaaataaaataaagaagccataaagatatccatgattgtactgataaagacatatggataattgctttaggcttcttttttattagttaatttatcaagtgagtatatttgagtaaaatattcactgcataaagattgaagataatccagattgtactataaatgaagataggtacatgactgagttctttaagtgcactaccatcccactgtggacttggacgctggaaagtcaatttagcaatcgtccaactagattgtagaacttcgcctaataatacgcctaaaatatattgataactcattgtgacaagtagttgaatttctactatattttcatcttttaatataaaatacaacatgatagaaattaaagttataacaacaacgggtgagccctttctagatgttaaaattaaaaaataaataaatatcaataaataggtaaatataaagaaactaggtatctgataatggctcgacgctaaacctatcaataacataataggtggcataaaataaccaccaatcgttgtaagccattggcctgctagatgtctagattgtgtaattgcgaatccttgttgtaatgtctgttgtcgctctcgtggacttgttacaatgactaaatcttttgcacggccaccagcgagtttattaaacagtacatgaccaaattcatgtgttaaaacagggatatagtttaaaatgacatctaaatagttcaaaacaggcttatgtctatattgatgaatagcaatataacaagctgcaacaataacgataatgtatatattaagttgaattgtcgtattaaaaaagtttgataaataattcattgttaacctcatataagatattaatttaaagtttgcttatcacttattataaatgatattagcatcaatagcgttagactttagacttaccttagttaaactaattttaatttttgaaaaggtgaatatgtgttaaaataaagcaaaatcatttcgatataaataggatgaatataaatactgttaatattgattacactaacataataatgaaataagataggagattcctgttatgactgttgaagaaagatccaatacagccaaagttgacattttaggggtcgattttgataatacaacaatgttgcaaatggttgaaaatattaaaaccttttttgcaaatcaatcaacgaataatctttttatagtaacagccaaccctgaaatagtgaattacgcgacgacacatcaagcgtatttagagttaataaatcaagcgagctatattgttgctgatgggacaggagtagtcaaagcttcgcatcgtttaaagcaacctctagcgcatcgtatacctggtattgagttgatggatgaatgtttgaaaattgctcatgtaaatcatcaaaaagtatttttgctaggggcaactaatgaagttgtagaagctgcacaatatgcattgcaacaaagatatccaaacatatcgtttgcacatcatcacggttatattgatttagaagatgagacggtagtgaaacgaattgaattgtttaaacctgattacatatttgtaggtatgggattccctaaacaagaagaatggattatgacacatgaaaatcaatttgaatctacagtgatgatgggcgtaggtggttctcttgaagtatttgctggggctaaaaagagggcgccttatatctttaggaaattaaacattgaatgggtatatagagcattaatagattggaaacgtattggtagattgaagagtattccaatatttatgtataaaatagccaaagcaaaaagaaaaataaaaaaggcgaaatagtcatgatgacaaaaataaaaccgaggaaatccttaaatggagattctcggttttttcggtttatttaataacgaagcgggactcatcgagtttgtttctaaattctttttgttcggctttggatttctttttaaaatcgttaaggaaagcttcatatttaggtaatacatcatcaagttcaccgtaatcttttaactttccgccttcaatccaagcaatcttagtacaaaattgtctcacttggcctaagttatgactaacgaaaaagatggttttgttttgctctttaaactcgtaaattttatctaaacatttttgtgcaaaagtttggtcacctacagataaagcttcgtcaatgactaagatatctggattaactgtgatattaattgaaaaaccaagttttgcacgcataccacttgaatactttttaactggttgataaataaactcaccaagttcactaaattcaataatcttaggtgtcatcgctttaatttctttacgcttaaagcccatacataacattttaaattcgatattttcaatccctgtaagttgtccgctcaagccagcactaattgcgataacgctgacttcaccattacgatccacttttccaacagtaggcgacaaagaaccgccaatgatattgctcaacgttgatttgccggaaccattgatgccaacaagccctatgacgtcaccttcatatgcttttaaactaatgtcatctaaagcgaaaaatgttttgtttttatgtttgggaatgagcgcatctttcatacgttctttatttgtacgataaatacgatattcttttgttacatttttaatgtttaccgaaacgttcatttgtagaccttccttattcacatttatctagattataatatactactcaacagttgttaaattttaaaacctgttgtaaagtgtatagaagattttgttattatcagagttagtgttttgacacaaaatgttaatcatcaatgataacaatgatatttaaaaactaaacttatttcaacttacatgattgtatactataatgtatttgtaataaactaatattttaaagaactagacaataattttgatagcatccatgtatagtgatagtatttacaacaattattataatactatttagttaagtagagaaatagttaaacatttgaaagtgtggtttaatggaatgtcagcaataggaacagtttttaaagaacatgtaaagaacttttatttaattcaaagactggctcagtttcaagttaaaattatcaatcatagtaactatttaggtgtggcatgggaattaattaaccctgttatgcaaattatggtttactggatggtttttggattaggaataagaagtaatgcaccaattcatggtgtaccttttgtttattggttattggttggtatcagtatgtggttcttcatcaaccaaggtattttagaaggtactaaagcaattacacaaaagtttaatcaagtatcgaaaatgaacttcccgttatcgataataccgacatatattgtgacaagtagattttatggacatttaggcttacttttacttgtgataattgcatgtatgtttactggtatttatccatcaatacatatcattcaattattgatatatgtaccgttttgttttttcttaactgcctcggtgacgttattaacatcaacactcggtgtgttagttagagatacacaaatgttaatgcaagcaatattaagaatattattttacttttcaccaattttgtggctaccaaagaaccatggtatcagtggtttaattcatgaaatgatgaaatataatccagtttactttattgctgaatcataccgtgcagcaattttatatcacgaatggtatttcatggatcattggaaattaatgttatacaatttcggtattgttgccattttctttgcaattggtgcgtacttacacatgaaatatagagatcaatttgcagacttcttgtaatatatttatatgacgaaaccccgctaaccattaataaatggaagtggggttcatttttgtttataatttaagtaaataacatattaagttggtgtattatgaacgttttaataaagaaattttatcatttggtagttcgaatactttctaaaatgattacgcctcaagtgattgataaaccgcatatcgtatttatgatgacttttccagaagatattaagcctatcatcaaagcattaaataattcgttgtatcagaaaactgttttaacaacaccaaaacaagcgccttatttatctgaacttagcgacgatgttgatgtgatagaaatgactaatcgaacattggtaaaacaaattaaggctttgaaaagcgcgcagatgattattatcgataattattacctattactaggtggatataataagacttctaatcaacgcattgttcaaacgtggcatgcaagtggtgcattaaaaaactttggcttaacagatcatcaagtcgatgtgtctgacaaggtaatggttcagcagtatcgtaaagtttatcaagcgacggatttttacttagtgggttgtgaacaaatgtcacaatgttttaaacagtctttaggtgcaacagaagagcaaatgttgtattttgggcttccgagaattaataaatattacacagctgatagagcaacggttaaggcagagttaaaggataaatatggaattacaaataagttggcattatatgtaccaacatatagagaagataaagcagataatagggctattgataaagcttattttgaaaaatgtttaccaggatatacactgattaataaattacatccatcaattgaacattcagacattgatgacgtatcttcaatcgacacgtctacattaatgttaatgtcagatataattattagcgactatagttcgctgccaatagaggctagcttgttagatattccaactatattttatgtgtatgatgaaggaacatatgataaggtgagaggcctgaatcaattttacaaagcaataccggatagctacaaagtgtatactgaagaagatttaataatgacgatacaagaaaaagaacatctattaagtccgttatttaaagattggcataagtataatactgataaaagtttacatcagctcacagaatatatagataagatggtgacaaaatgaggcttacgataatcatacctacatgtaataatgaggcaacaattcgacaattgttaatatctattgagagtaaagaacactatagaatcctttgtattgatggtggttctactgatcaaacaattcctatgattgaacggttacaaagagaactcaagcatatttcattaatacaattacaaaatgcttcgatagctacgtgtattaataaaggtttgatggatatcaaaatgacagattctcatgatagtgacgcatttatggtcataaatccaacatcaatcgtattgccaggtaaattagataggctaactgcagcattcaaaaataatgataatattgatatggtaatagggcagcgagcttacaattaccatggtgaatggaaattgaaaagtgctgatgagtttattaaagacaatagaatcgttacattaacggaacaaccagatttgttaacaatgatgtcttttgacggaaagttattcagtgctaaatttgctgaattacagtgtgacgaaactttagctaacacatacaatcacgcaatacttgtcaaagcgatgcaaaaagctacggatatacatttagtttcacagatgattgtcggagataacgatatagatacacatgctacaagtaacaatgaagattttaatagatatatcacagaaattatgaaaataagacaacgagtcatggaaatgttactattacctgaacaaaggctattatatagtgatatggttgatcgtattttattcaataattcattaaaatattatatgaatgaacacccagcagtaacgcacacgacaattcaactcgtaaaagactatattatgtgtatgcagcattctgattatgtatcgcaaaatatgtttgacattataaatacagttgaatttattggtgagaattgggatagagaaatatacgaattgtggcgacaaacattaattcaagtgggcattaataggccgacttataaaagattcttgatacaacttaaagggagaaagtttgcacatcgaacaaaatcaatgttaaaacgataacgtgtacattgatgaccaaaaactgcaatcctatgatgtgacaatatgaggaggataacttaatgaaacgtgtaataacatatggcacatatgacttacttcactatggtcatatcgaattgcttcgtcgtgcaagagagatgggcgattatttaatagtagcattatcaacagatgaatttaatcaaattaaacataaaaaatcttattatgattatgaacaacgaaaaatgatgcttgaatcaatacgctatgtcgatttagtcattccagaaaagggctggggacaaaaagaagacgatgtcgaaaaatttgatgtagatgtttttgttatgggacatgactgggaaggtgaattcgacttcttaaaggataaatgtgaagtcatttatttaaaacgtacagaaggcatttcgacgactaaaatcaaacaagaattatatggtaaagatgctaaataaattatatagaactatcgatactaaacgataaattaacttaggttattataaaataaatataaaacggacaagtttcgcagctttataatgtgcaacttgtccgtttttagtatgttttattttctttttctgaataaacggttgattatcatatgaacaattagtgctaatccagcgacaaggcatgcaccaccaatgatagtgaataatggatgttctgcccacatacttttagcaacagtatttgccttttgaataattggctgatgaacttctacagttggaggcccataatcattattaataaattctcttggatagtccgcgtgtactttaccatcttcgactacaagtttataatcttttttactaaaatcacttggtaaaacatcgtaaagatcattttcaacataatatttcttaccatttatcctttgctcacctttagacaatatttttacatatttatactgatcaaatgaacgttccattaatgcattccccatcatattacgttgcttctcgccaccaaggtttttatagtctcctgcacccatgataacttgattaattctaaatttacctcgtttggtagtaatcgtatggttgtaatttgctgtatcacttgatccagtttttaaaccatctgtaccaggcaaactcatttttgcaccttctaatgaaaagttgaatgtgtaatacgtaactgcatgcgttgttggtgctaactgctttgtaaagtctaatattttaggtgtctctttaatcacgtgtaaatctaaaatggcatagtctctagcagtcgttacagtacgttcttggtctttatactttgttggtgcaaatgtacgtaatcttgaattttcagcacctgttggattgacgaaatgtgtatttttcattccgatagctttagctttgttattcattaaatcaacgaaatcgctggtgttttttgataccttcttagctaaaattaatgccgcggcattgctagaattagatactgtaatttgtaatagatctgcgattgtccatacttgtccaggatatagcttcgtattactcagctcaggtagtgtagacataatatattctttgttcgtcattgtgacagtgtcatcaagtgaaagctgccccttatttacagcttccaatgttaagtacattgtcattaatttagtcatagacgctggattccacttagtatcgatattgtattgatacagtaattgtccagtttgacttacattaacagcactcgttggttcgtatgcagccgacaaacctgcataaccatattgatttcctgcttgtacaggggttacgtcactgttagcagcttgtgcatatggtgtcataatacttaatgttaaacataaaatgatgataatagatattaaatttttcataaagcgttaatcttcccttttccaattcttaaatattccctaaaagcaatggtcattcctacttacggaaatcattgctaattcacttcaccttaattaaattgttgaaaataaagttttctgcagttaatttgaaaaataatgcaaatatattacgtgcgtagctaaaggtgttataatgtttgtacgaagagcaaacttactcaaaagcgattaattatcatgttttaatataaagactttgagaagttattacaaaaaatgcaatagaaatattctatcatataaatgttatgagcggtattttggggcaatactttatttgatttttaaagttttgttgggagaaagtatatgatagaaatgcatgtatctatctaaatgaattaactataaatttcaaacagaagaggtaaaactatgaaacgagaaaatccattgtttttcttatttaaaaaactaacatggccagtgggtcttatcgttgcagctatcactatttcatcactagggagcttaagtggactattagtgccactgtttactggacgaattgtagataaattttccgtgagccatatcaattggaacctaatcgcattatttggtggtatctttgtcatcaatgctttattaagcggattaggtttatatttattaagtaaaattggtgaaaaaattatttatgcgatacgctcagttttatgggagcatatcatacaattaaaaatgccattctttgacaaaaatgaaagtggtcaattaatgagtcgattaactgatgatacgaaagtgataaatgaatttatttcacaaaagctacctaacttattaccatcaatcgttacattagttgggtcactaattatgttatttattttagattggaaaatgacattattaacatttataacgataccgatatttgttttaattatgattcctctaggtcgtattatgcaaaagatatcgacaagtacacaatctgaaattgcaaacttcagtggtttgttagggcgtgtcctaacagaaatgcgtcttgttaaaatatcaaatacagagagacttgaattagataatgcacataaaaatttgaatgaaatatataaattaggtttaaaacaggctaaaattgcggcagttgtacaaccaatttcaggtattgttatgttgctaacaattgcaattattttaggttttggtgcattagaaattgcgactggtgcaatcacggcaggtacattaattgcaatgatattttatgttattcaattatcgatgcctttaatcaatctttcaacgttagttacagattataaaaaggcagtcggtgcaagtagtagaatatacgaaatcatgcaagaacctattgaaccgacagaagctcttgaagattctgaaaatgtattaattgatgacggtgtgttgtcatttgaacatgtagactttaaatatgatgtgaagaaaatattagatgatgtgtcgttccaaatcccacaagggcaagtgagtgcttttgtaggtccttctggatctggtaaaagtacgatatttaatctgatagaacgtatgtatgaaattgagtcaggtgatattaaatatggccttgaaagtgtctatgatatcccgttatctaagtggcgacgcaaaattggatatgttatgcaatcaaattcgatgatgagtggtacaattagagacaatattttatacggaattaatcgtcatgtttcagatgaagaacttattaattatgctaaattagcgaactgtcatgattttatcatgcaatttgatgaaggatatgacacgcttgtaggtgaacgaggattgaaactgtctggcggacaacgtcaacgtattgatattgctagaagttttgttaaaaatcctgatattttgttacttgatgaagcaacagctaatctcgatagtgaaagtgaattgaaaattcaagaagctttagaaacattgatggaaggtagaacaacgattgtcattgcgcatcgtttgtctacaattaaaaaagccggtcaaattatattcttagacaaaggacaggtaacaggtaaaggtacgcattcagaactgatggcatcacatgcgaagtataaaaactttgtagtgtctcaaaaattaacagattaattttatatatatatataagtaagcttggagcaaatagacatataccatcgaggaaattaaagtgtggcacattgatggatatagatgttaataaattgcttcaagcttttgtctattttaaatcatttgagaagttatgacataataattcttaaattaatgaaatcgatattttaagaaaaaaatgctcatggtataatacaagttataagcaaacatacatatattaaatactgtagccacgagtcataattcttcatattttacatagcaatttaactgattttagagtccacggtacagaattttgatatttcaatgtttctaaatttttaaaaaattaaatcataggtgggtgccaaatgtttttattaatcaacattattggtctaattgtatttcttggtattgcggtattattttcaagagatcgcaaaaatatccaatggcaatcaattgggatcttagttgttttaaacctgtttttagcatggttctttatttattttgattggggtcaaaaagccgtaagaggagcagccaatggtatcgcttgggtagttcagtcagcgcatgctggtacaggttttgcatttgcaagtttgacaaatgttaaaatgatggatatggctgttgcagccttattcccaattttattaatagtgccattatttgatatcttaatgtactttaatattttaccgaaaattattggaggtattggttggttactagctaaagtaacaagacaacctaaattcgagtcattctttgggatagaaatgatgtttttaggaaatactgaagcattagccgtatcaagtgagcaactaaaacgtatgaatgaaatgcgtgtattaacaatcgcaatgatgtcaatgagctctgtatcgggagctattgtaggtgcgtatgtgcaaatggtaccaggagaactggtactaacggcaattccactaaatatcgttaacgcgattattgtgtcatgcttgttgaatccagtaagtgttgaagagaaagaagatattatttacagtcttaaaaacaatgaagttgaacgtcaaccattcttctcattccttggagattctgtattagcagcaggtaaattagtattaatcatcatcgcatttgttattagttttgtagcgttagctgatctatttgatcgttttatcaatttgattacaggattgatagcaggatggataggcataaaaggtagtttcggtttaaaccaaattttaggtgtgtttatgtatccatttgcgctattactcggtttaccttatgatgaagcgtggttggtagcacaacaaatggctaagaaaattgttacaaatgaatttgttgttatgggtgaaatttctaaagatattgcatcttatacaccacaccatcgtgcggttattacaacattcttaatttcatttgcaaacttctcaacgattggtatgattatcggtacattgaaaggaattgttgataaaaagacatcagactttgtatctaaatatgtgcctatgatgctattatcaggtatcctagtttcattattaacagcagctttcgttggtttatttgcatggtaatatgtcgaagagagactatgataatacattttaactaatgaatatgttcaggcatgtcgtctattgatataggtgagatgcttggacttttttattattgatataaagatatttaaatatttttaaagttaccgaaattgaagcattataaaaaccaagtgcacatggtaatacacttggcttttatgggaaatgaatattattgtacatatgacagtgaagaacattatcttgaaattgaatcaagatatttcaaaaatcgtttgaatataaagcaagtatcaccagatttggataataaagactttattatgattcgtggaggatatagttcatgagtgtgaaagtgataggtgataaagcattagaaagagaattagaaaaacgttttggcataaaagagatggtaaaagttcaagataaggcgttaatagctggtgctaaggtaattgttgaagaagtaaaaaaacaactaaagccctcaaaagatacgggagcattaattaatgaggtaagttttagtaaacctgaatggataaacggaaaacgtacaattactgttcattggcgaggttctaaagaccgttataaaatcgtacatttaattgaatatggacacgttcaaaaaggaacaggtaaatttatcaaacctaaagctatgggcggtgttaatagagcaataagacaagggcaaaataagtattttgagacgctaaaaagggagttgaaaaaattgtgattgatattttgtacaaagttcatgaagtgattagtcaagacagaattattagagagcacgtaaatatcaataatattaagttcaataaataccctaatgtaaaagatactgatgtaccttttattgttattgacgatatcgacgacccaatacctacaacttatactgacggagatgagtgtgcatatagttatattgtccaaatagatgtttttgttaagtacaatgatgaatataatgcgagaatcataagaaataagatatctaatcgcattcaaaagttattatggtctgaactaaaaatgggaaatgtttcaaatggaaaaccggaatatatagaagaatttaaaacatatagaagctctcgcgtttacgagggcattttttataaggaggaaaattaaatggcagtaaaacatgcaagtgcgccaaaggcgtatattaacattactggtttaggtttcgctaaattaacgaaagaaggcgcggaattaaaatatagtgatattacaaaaacaagaggattacaaaaaattggtgttgaaactggtggagaactaaaaacagcttatgctgatggcggtccaattgaatcagggaatacagacggagaaggtaaaatctcattacaaatgcatgcgttccctaaagagattcgcaaaattgtttttaatgaagattatgatgaagatggcgtttacgaagagaaacaaggtaaacaaaacaattacgtagctgtatggttcagacaagagcgtagagacggtacatttagaacagttttattacctaaagttatgtttacaaatcctaaaatcgatggagaaacggctgagaaagattgggatttctcaagtgaagaggttgaaggtgaggcacttttccctttagttgataataaaaagtcagtacgtaagtatatctttgattcagctaacatgacaaatcatgatggagacggtgaaaaaggcgaagaggctttcttaaagaaaattttaggcgaagaatatactggaaacgtgacagagggtaacgaagaaactttgtaacaaaaccggcttcatcggaaactgcggtaaagtcggttaatataccagatagcattaaaacacttaaagttggcgacacatacgatttaaatgttgtagtagagccatctaatcaaagtaagttattgaaatacacaacagatcaaacgaatattgtatcaatcaatagtgatggtcaagttactgcggaagcacaaggcatttctacggttaaagcaacagttggtaatatgagtgacactataacaataaatgtagaagcataagagggggcaacccctctattttatttgaaaataaggagagtattataaaatggcaaaattaaaacgtaacattattcaattagtagaagacccgaaagcaaatgaaattaaattacaaacgtacttaacaccacacttcatttcatttgaaattgtatacgaagcaatggatttaatcgatgatattgaggacgaaaatagcacgatgaaaccaagagaaatcgctgacagattgatggatatggttgtaaaaatttacgataaccaattcacagttaaagacctaaaagaacgtatgcatgcacctgatggaatgaatgcacttcgtgaacaagtgattttcattactcaaggtcagcaaactgaggaaactagaaattttatccagaacatgaaataaagcctgaagatttaacatataaagcaatgttgaaaaatatggatactctcatgatggacttaattgaaaatggtaaagacgctaacgaagttttaaaaatgccatttcattatgtactttccatatatcaaaataaaaacaataacatttctgaagaaaaagcagaggctttaattgatgcgttttaaccttaaccgtttggttagggttatttttttgaacttttttagaaaggaggtaaaaaaatgggagaaagaataaaaggtttatctataggtttggatttagatgcagcaaatttaaatagatcatttgcagaaatcaaacgaaactttaaaactttaaattctgacttaaagttaaccggtaacaacttcaaatataccgaaaaatcaactcatagttacaaacaaaggattaaagaacttgatggaactatcacaggttataagaaaaacgttgatgatttagccaagcaatatggcaaggtatctcaagaacagggcgaaaacagcgtggaagctcaaaaattacgacaagaatataacaaacaagcaaatgagctgaattttttagaaaaagaactagaaaaaacaacaactgagtttgaagagttcaaaaaagctcaagttgaagctcaaagaatggcagaaagtggctggggaaaaaccagtaaagtttttgaaagtatgggacctaaattaacaaaaatgggtgatggtttaaaatccattggtaaaggtttgatgattggtgtaactgcacctgttttaggtattgcagcagcatcaggaaaagcttttgcagaagttgataaaggtttagatacagttacccaagcaacaggagcaaccggcggagagcttaagaagttgcagaattcatttaaagatgtttatggcaactttccagaagacgctgagactgtaggcggtgttttaggggaagttaacacaaggttaggtttcactggcaaagaacttgagagtgccacagagtcattcttgaaatttagtcacataacaggttctgacggcgtacaagccgttcaattaattacgcgtgcaatgggtgatgcaggtattgaagctgatgagtatcaaagtgtacttgatatggtagcgaaagcagcacaggctagcggtataagtgttgatacattagctgatagcattactaaatacggtgctccaatgagggctatgggctttgagatgaaagaatcaatcgctttattctctcaatgggagaaatcaggtgttaatactgaaatagccttcagtggtttgaaaaaagctatatccaattggggtaaagcgggtaaagacccaagagaagaatttaagaagacattagcagaaattgaaaggacaccggatatagctagcgcaacaagtttagcgattgaagcatttggtgcaaaagcaggtcctgatttagcagatgctattaaaggcggtcgctttagttaccaagagttcttaaaaactatcgaagattcgcaaggaacggtcaatcagacatttaaagattctgaaagtggctccgaaagatttaaagtagcaatgaataaacttaaattagtaggtgctgatgtatgggcttctattgaaagtgcgtttgctccagtcatggaagaattaatcaaaaagctatctgtagcagttgattggttttcaagtttaagtgatggatctaaaaggtcgattgttatattcggtggtattgctgctgcaattggtcctgtagtttttggattaggtgcattcataagcacagttggcaacgcagtaactgtattagctccattattagctagtattgcaaaggctgacggattgattagttttttatcaactaaagtgcctattttaggaacagtcttcacagcattaactggtccaattggtatcgtgttaggtgtactggctggtttagcagtcgcatttacaatagcttataagaaatctgaaacattcagaaattttgttaatggtgcaattaacagtgttaaacaaacgtttagtaatttcattcaatttatccaacctttcattgattccgttaaaaacgtctttaaacaagcggtttcagcaatcgttgatttcgctaaagatatttggagtcaaattaatggattctttaatgaaaacggaatttctattgttcaagcgcttcaaaatatatgcaattttatcaaagctatatttgaatttatcttaaattttgtaattaaaccaatcatgtttgcgatttggcaagtgatgcaatttatttggccggcggttaaagccttgattgtcagtacttgggagaatataaaaggagtaatacaaggtgctttaaatatcatacttggctttattaagttcttttcaagtttattcactggtaattggcgaggtgtttgggacggtattgtgatgatactaaaaggcactgtgcagttaatttggaatttaatacaactgtggtttgtaggtaagattctaggtgttgttagatactttggtggattgcttaaaggtttaatatccggtatctggggtgttgtcaaaggtattttcacaaaatcattatctgcaatttggaatgcaacgaaaagtatttttggtttcttatacaatagtgttaaatctattttcactaatatgaaaaactggttatctaatgcgtggaataatatcaaaagcaataccgtcggcaaggctcattcgttatttacgggtgtaaggtctaaattcacaagtttatggaatgcgacgaaagatatatttactaaattaagaaattggatgtcaaacatctggaactctattaaagataacacggtaggtatagctggtcgtttgtgggataaagtacgtaatatcttcggaaacatgcgtgacggtttaaaatctatcattggtaaaattaaagatcatatcggcggtatggtagatgctattaaaaaaggacttaataaattaattgaaggcttaaactgggtcggtggtaagttaggtatggatgaaatacctaggttacacactggtacagagcacacacatactactacaagattagttaagaacggtaagattgcacgtgatacattcgctacagttggggataaaggacgtggaaatggtccaaatggttttagaaatgaaatgattgaattccctaatggtaaacgtgtaatcacacctaatacagacactactgcttatttacctaaaggctcaaaagtatacaacggtgcacaaacttattcaatgttaaacggaacgcttccgagatttcatttcggtactactatgtggaaagatattaaatctagtgcatcatcggcatttaactggacaaaagatcaaataggtaaaggtaccaaatggcttggcgataaagttggcgatgtaatggactttattgataatccgggtaagcttttaaattatgtgctcaaagcgtttggtgttgactttagctctctaactaaaggtatgggtattgttggcgatataacaaaagcgtcttggaataagattaaaagtaaggcgattaattggataaaagaaggattagagagccaagcgggagatggttctgtgtttgatagtttcagaatactacaaccttattcagcaccgccaaaacctcctaaccccaattatccatttaacggaggcgttcatcatggtgttgactatgatacgccgaccggtacccctatacgtacgccaatgggtggacgtgttagaagttggtatgacaactatggtggcggtaaagcaattactgttcaaaaaggtcgaacatttttgtggttcatgcacttatctgaacaattgcgtagaacaggtgaacaaattaaagctggtcaattaattggtaaatcaggtaatacaggttctatgactaattaccgccatttacatttccaagtcaatcaaggcggagagtccaataggtattcgacagaccctattccttggttacggaaaaacgacaaaactggtggaaagaattcacctggagggagtggttctgaaaatgcgcgcagagcgattagaacagctcaaaatatacttggaggtcaatacaaagctagctggattacacacgaaatgatgcgtgtagcaagacgtgaatccaattatacagctaatgcagttaataattgggatagcaacgcaagagctggtacaccttcaagaggtatgttccaaatgatagatccttcatttagagcgtacgcaaagtcgggttacaataatcctcttaacccaactcatcaagctatatcggctatgagatatattgtgggtaaatgggtaccaagaacgggctcatggagagctgcgttcaaacgcgctggtgattacgcatatgctactggtggcaaagtctacaacggattgtaccacttaggagaagaaggatatccagagtgggttattcctactgatcctgcacgtaaaaacgaagcaatgaagatgttacattatgcagcagcagaagtaagagggagaaaagcgagtaaaaataagcgtcctagtcaattgtctagtgtaaatgggtttgatgacccaagcttattattgaaaatgattgaacaacagcaacaacaaatagctttattactgaaaatagcgcaatcaaacgatgtgattgcagataaagattatcagccgattattgacgaatacgcttttgataaaaaggtgaacgcgtctatagaaaagcgagaaaggcaagaatcaacaaaagtaaagtttagaaaaggaggaattgctattcaatgatagacactattaaagtgaacaacaaaacaattccttggttgtatgtcgaaagagggtttgaaataccctcttttaattatgttttaaaaacagaaaatgtagatggacgttcgggggctatatataaagggcgtaggcttgaatcttatagttttgatatacctttagtggtacgtaatgactatttatctcacaacggcattaaaacatatgatgacgtcttgaatgaattagtaaagttttttaactacgaggaacaagttaaattacaattcaaatctaaagattggtactggaacgcttattttgaaggaccaataaagctgcacaaagaatttacaatatctgttaagttcactatcaaagtagtactaacagacccttacaaatattcagtaacaggaaataaaaatactgcgatttcagaccaagtttcagttgtaaatagtgggactgctgacactcctttaattgttgaagcccgagcaattaaaccatctagttactttatgatcactaaaaatgatgaagattattttatggttggtgatgatgaggtaaccaaagaagttaaggattacatgcctcctgtttatcatagtgagtttcgtgatttcaaaggttggactaagatgattactgaagatattccaagtaatgatttaggtggtaaggtcggcggtgactttgtgatatccaatcttggcgaaggatataaagcaactaattttcctgatgcaaaaggttgggttggtgctggcacgaaacgagggctccctaaagcgatgacagattttcaaattacctataaatgtattgttgaacaaaaaggtaaaggtgccggaagaacagcacaacatatttatgatagtgatggtaagttacttgcttctattggttatgaaaataaatatcatgatagaaaaataggacatattgttgttacgttgtataaccaaaaaggagaccccaaaaagatatacgactatcagaataaaccgataatgtataacttggacagaatcgttgtttatatgcggctcagaagagtaggtaataaattttctattaaaacttggaaatttgatcacattaaagacccagatagacgtaaacctattgatatggatgagaaagagtggatagatggcggtaagttttatcagcgtccagcttctatcatagctatctatagtgcgaagtataatggttataagtgaatggagatgaatggattaggttcattcaatacggagattctaccaaaaccgaaaggcgcaagggatgtcattatacaaaaaggtgatttagtaaaaatagatatgcaagcaaaaagtgttgtcatcaatgaggaaccaatgttgagcgagaaatcgtttggaagtaattatttcaatgttgattctgggtacagtgaattaatcatacaacctgaaaacgtctttgatacgacggttaaatggcaggatagatatttatagaaaggagatgagagtgtgatacatgttttagattttaacgacaagattatagatttcctttctactgatgacccttccttagttagagcgattcataaacgtaatgttaatgacaattcagaaatgcttgaactgctcatatcatcagaaagagctgaaaagttccgtgaacgacatcgtgttattataagggattcaaacaaacaatggcgtgaatttattattaactgggttcaagatacgatggacggctacacagagatagaatgtatagcgtcttatcttgctgatataacaacagctaaaccgtatgcaccaggcaaatttgagaaaaagacaacttcagaagcattgaaagatgtgttgagcgatacaggttgggaagtttctgaacaaaccgaatacgatggcttacgtactacgtcatggacttcttatcaaactagatatgaagttttaaagcaattatgtacaacctataaaatggtattggatttttatatagagcttagttctaataccgtcaaaggtagatatgtggtactcaaaaagaaaaacagcttattcaaaggtaaagaaattgagtatggtaaagatttggttgggttaattaggaagattgatatgtcagaaatcaaaacagcattaattgctgtgggacctgaaaatgacaaaggaaagcgtttagagttagttgtgactgatgacgaagcacaaagtcaattcaacttacctacccgttatatttggggaatatacgaacctcaatcagatgatcaaaatatgaatgaaacacggttgcgttctttagccaaaacagagttaaataaacgtaagtcggcagttatgtcatatgagattacttctactgatttggaagttacgtatccgcacgagattatatcaattggtgatacagtcagagtaaaacatagagattttaacccgccattgtatgtagaggcagaagttattgccgaagaatataacataatttcagaaaatagcacatatacattcggtcaacctaaagagttcaaagaatcagaattacgagaagagtttaacaagcgattgaacataataaatcaaaagttaaacgataatattagcaatatcaacactatagttaaagatgttgtagatggtgaattagaatactttgaacgcaaaatacacaaaagtgatacaccgccagaaaatccagtcaatgatatgctttggtatgatacaagtaaccctgatgttgctgtcttgcgtagatattggaatggtcgatggattgaagcaacaccaaatgatgttgaaaaattaggtggtataacaagagagaaagcgctattcagtgaattaaacaatatttttattaatttatctatacaacacgctagtcttttgtcagaagctacagaattactgaatagcgagtacttagtagataatgatttgaaagcggacttacaagcaagtttagacgctgtgattgatgtttataatcaaattaaaaataatttagaatctatgacacctgaaactgcaacgattggtcggttggtagatacacaagctttatttcttgagtatagaaagaaattacaagatgtttatacagatgtagaagatgttaaaatcgccatttcagatagatttaaattattacagtcacaatacactgatgaaaaatataaagaagcgttggaaataatagcaacaaaatttggtttaacggtgaatgaagatttgcagttagtcggagaacctaatgttgttaaatcagctattgaagcagctagagaatccacaaaagaacaattacgtgactatgtaaaaacatcggactataaaacagacaaagacggtattgttgaacgtttagatactgctgaagctgagagaacgactttaaaaggtgaaatcaaagataaagttacgttaaacgaatatcgaaacggattggaagaacaaaaacaatatactgatgaccagttaagtgatttgtccaataatcctgagattaaagcaagtattgaacaagcaaatcaagaagcgcaagaagctttaaaatcatacattgatgctcaagatgatcttaaagagaaggaatcgcaagcgtatgctgatggtaaaatttcggaagaagagcaacgcgctatacaagatgctcaagctaaacttgaagaggcaaaacaaaacgcagaactaaaggctagaaacgctgaaaagaaagctaatgcttatacagacaacaaggtcaaagaaagcacagatgcacagaggagaacactgactcgctatggttctcaaattatacaaaatggtaaggaaatcaaattaagaactactaaagaagagtttaatgcaaccaatcgtacactttcaaatatattaaacgagattgtccaaaacgttacagatggaacaacaatcagatatgatgataacggagtggctcaagctttaaatgtggggccacgtggtattagattaaatgctgataaaattgatattaacggtaatagagaaataaaccttcttatccaaaatatgcgagataaagtagataaaaccgatattgtcaacagccttaatttatcaagagagggtcttgatatcaatgttaatagaattggaattaaaggcggtaacaataacagatatgttcaaatacagaatgattctattgaactaggtggtattgtgcaacgaacttggaaaggcaaacgatcaaccgatgatatattcacacgtcttaaagatggacatctaaggtttagaaataataccgcaggcggttcactttatatgtcacattttggtatttcaacatatattgatggagaaggcgaagacggaggttcatccggtactattcaatggtgggataaaacttacagtgatagcggtatgaatggcataacaatcaattcctatggtggtgtcgttgcactaacgtcagataataatcgggttgttctggagtcttacgcttcatcgaatatcaaaagcaaacaggcaccggtgtatttatatccaaacacagacaaagtgcctggattaaaccgatttgcattcacgctgtctaatgcagataatgcttattcgagtgacggttatattatgtttggttctgatgagaactatgattacggtgcgggtatcaggttttctaaagaaagaaataaaggtcttgttcaaattgttaatggacgatatgcaacaggtggagatacaacaatcgaagcagggtatggcaaatttaatatgctgaaacgacgtgatggtaataggtatattcatatacagagtacagacctactgtctgtaggttcagatgatgcaagagataggatagcttctaactcaatttatagacgtacttattcggccgcagctaatttgcatattacttctgctggcacaattgggcgttcgacatcagcgcgtaaatacaagttatctatcgaaaatcaatataacgatagagatgaacaactggaacattcaaaagctattcttaacttacctattagaacgtggtttgataaagctgagtctgaaattttagctagagagctgagagaagatagaaaattatcggaagacacctataaacttgatagatacgtaggtttgattgctgaagaggtggagaatttaggattaaaagagtttgtcacgtatgatgacaaaggagaaattgaaggtatagcgtatgatcgtctatggattcatcttatccctgttatcaaagaacaacaactaagaatcaagaaattggaggagtcaaagaatgcaggataacaaacaaggattacaagctaatcctgaatatacaattcattatttatcacaggaaattatgaggttaacacaagaaaacgcgatgttaaaagcgtatatacaagaaaataaagaaaatcaacaatgtgctgaggaagagtaatccttagcactatttttatacaaaaatttaaggaggtcatttaattatggcaaaagaaattatcaacaatacagaaaggtttattttagtacaaatcgacaaagaaggtacagaacgtgtagtatatcaagatttcacaggaagttttacaacttctgaaatggttaaccatgctcaagattttaaatctgaagaaaacgctaaaaaaattgcggagacgttaaatttgttatatcaattaactaacaaaaaacaacgtgtgaaagtagttaaagaagtagttgaaagatcagatttatctccagaggtaacagttaacactgaaacagtatgaaaagctatgagttagatactcataatctttattcttttagaaagcgggtgtactgaattggggtggttcaaaaaacacgaacatgaatggcgcatcagaaggttagaagagaatgataaaacaatgctcagcacactcaacgaaattaaattaggtcaaaaaacccaagagcaagttaacattaaattagataaaaccttagatgctattcaaaaagaaagagaaatagatgaaaagaataagaaagaaaatgataagaacatacgtgatatgaaaatgtgggtgcttggtttagttgggacaatatttgggtcgctaattatagcattattgcgtatgcttatgggcatataagagaggtgaataaaatgtttaaactaatctttggttatagtttctggacatgtttttggttcggtaaatgtaaatgagttttagtcagtgcttcggtactgactttttatttattgttgtaattatggtaatatgcagaagtgagcaagttggatagatggtggctatctgagtataaggaggtggtgcctatggtggcattactgaaatctttagaaaggagacgcctaatgattacaattagtaccatgttgcagtttggtttattccttattgcattgataggtctagtaatcaagcttattgaattaagcaataaaaaataaccatcgctaactttggctggtttcgatggttaaatggttattaatttaatctttaatctaaaatagccaccgtctttttaacgggctcattagggtaacatgtttgcgcatgttgccctttttctatatataaattaacacaccataatataaatatcaaatagacggcttattagtcgtctttttattttgggtaaaaggagataagaatatgattaattggaaaattagaatgaaacaaaaatcattttgggtagcgatattgtcagctatctttttatttgctcaaaacatcgcaaaagctattgggtatgatatccaagtttatacagagcaattaacagacggtttaaacgctatattaggatttttagtattaactggtgtgattcaagacccgactactaaaggtataggtgatagccaccaagctttagaatatgaagaaccaagaagaaaatactaggaggtaaaataatgaaaacatacagtgaagcaagagcaaggttacgttggtatcaaggtagatatattgattttgacggttggtatggttaccaatgtgcagatttagcagttgattacatttattggttgttagaaattagaatgtggggaaatgcaaaagatgcaatcaataacgattttaaaaacatggcaacagtatatgaaaacacaccatcgtttgttccacaaataggtgatgtggctgtatttaccaaaggaatatataaacaatacggtcatattggtttagtgtttaatggtggtaatacaaaccaatttttaattttggaacagaactatgacggtaacgcaaatacgcctgcaaagttacgttgggataattattacggctgtactcactttattagacctaagtataaaagtgagggcttaatgaataagatcacaaataaagttaaaccacctgctcaaaaagcagtcggtaaatctgcaagtaaaataacagttggaagtaaagcgccttataaccttaaatggtcaaaaggtgcttattttaatgcgaaaatcgacggcttaggtgctacttcagccactagatacggtgataatcgtactaactatagattcgatgttggacaggctgtatacgcgcctggaacattaatatatgtgtttgaaattatagatggttggtgtcgcatttattggaacaatcataatgagtggatatggcatgagagattgattgtgaaagaagtgttttaattcttaggttaaaatgttaaatatttgttaattattttttaatgtaagtttagtttcttttaatattttattgatttttaatattttctcaatataaaatgaagttgttgatatttatcatcttaaataagggtgttagctataaaaagagataaataaaaacaaatatattatatttggaggaagcgccatgctcaaaagaagtttattatttttaactgttttattgttattattctcattttcttcaattactaatgaggtaagtgcatcaagttcattcgacaaaggaaaatataaaaaaggcgatgacgcgagttattttgaaccaacaggcccgtatttgatggtaaatgtgactggagttgatggtaaaggaaatgaattgctatcccctcattatgtcgagtttcctattaaacctgggactacacttacaaaagaaaaaattgaatactatgtcgaatgggcattagatgcgacagcatataaagagtttagagtagttgaattagatccaagcgcaaagatcgaagtcacttattatgataagaataagaaaaaagaagaaacgaagtctttccctataacagaaaaaggttttgttgtcccagatttatcagagcatattaaaaaccctggattcaacttaattacaaaggttattatagaaaagaaataaaacaaaatagttgtttattatagaaagcaatgtcttgattgaatatgtgtagtgaaaattatctttcatcaaattctcattcatgcacgaatggttcttccccacctaatcagatattaggtgacttatggggagaaatcagttaggatgaaaaagtggataatccttttttaggcaggtacttcggtacttgcctatttttttatgttataatctttctagacgtattcaagggacgtctttttagattgtatgttatagctagctttcgggctagttttttgttatgatgtgttacacatgcatcaactatttacatctatccttgttcacccaagcatgtcactgggtgttttttcttatgatagagagcatagttttcatactactccctcgtagtatatatgactttagcattcccgtataatagtttacggggtgcttttcatgttataattaactgtatatagtaggagtgaactatatagcctgttaagtggcctagtaacctaacacttatcctgcaattgatatcctttttgcccttcactcgatacatatatctcaacaacatagaaatattacagtcgctacaccgcatcttaaatggtgtggttatttttattggaagtgtgtatcaggtatcagtaatgttaaaacaccagctaaaaatgaaaagaattcaccagtgccagcaggttatacactcgataaaaacaatgtaccgtataaaaaagagactggttattacacagttgccaatgttaaaggtaataacgtgagggatggctattcaactaattcaagaattacaggtgtattacccaataacgcaactatcaaatatgacggcgcatattgcattaatggctatagatggattacttatattgctaatagtggacaacttcgttatatagcgacaggagaggtagacaaggcaggtaatagaataagcagttttggtaagtttagtgcagtttgataattagatatataaaggtttggcaagttatgaaatgtctgccaaacctttatataaaaaagaaatatctaccttttaatttatgtaactactattagtatgcatattcattagtttttccaggaccattaattacataagatgatttagactctccttttttaaagaagtatgttttatacattttacctagtaactcaacattttttctatcttcagcaagtggtgtattcagatatactgtatagtaacctttattttcagttaaaataaccattttttcaaattgagcagaatttttttgtgcctttctttaaataatttctcaaacgttcatctaattttcctagcgttgtaggaagaccactatttttaaatgattctttataagctttttctttctctaacattttcttatttgattctatttcttcatttgtaggaaacggttcaaaagtaaaagctttcgctgaatgatggtgtgtactgattcctgccgttaaaaaacttaatgctaaaactgttgttgctaatttctttttcataatgatgttaattctccttaaattctatatttaaatttatagttagttttgcgaaattcctaaaatgagtttaatctaatcgacgaaatatattaattaacttaaaattaataaaagattaattatttttaactaaaaattaaaattcaattagtgttttgatgaatttggtctcgataaattgaaataatctaaaaaacgctataatttttctattaatagtaattaatatgtgctatatttatcttagacacagcaatgtgttcaaattttcatctattcataagctagccttcgggctagtttttttgtgctatatatatttgttttaattaaataaaattagataatgcaatagtagccattttatgttaatattacctcgggcgttttcaaggagcgcctttcattttttatgtattgctccccttcgggctagtttattaaatttatttttgcgctttccaaatcaatgtatatgtgttatattgtttatgggaagtaggtaagcatttcggtgcttacctttttttgtttttctataaatacaataaggtatgtcaatttgataatttattaattttcatttaataagaagatctatatagttaatgaataattaatgtacttttttttagttagtcattaaaataaattagtactaattactaaggagaataaaaaatgaaaattagaaaatctatacttgcgggaactttagcaatcgttttagcatcaccactagtaactaatctagataaaaatgaggcacaagctagcacaagcttgccaacatcgaatgaatatcaaaacgaaaagttagctaatgaattaaaatcgttattagatgaactaaatgttaatgaattagctactggaagtttaaacacttattataagcgaactataaaaatttcaggtcaaaaagcaatgtatgctcttaagtcaaaagactttaagaaaatgtcagaagcaaaatatcaacttcaaaagatttataacgaaattgacgaagcactaaaaagtaaatattaaaaacaggctgggacataaatccctaaaaaacagcagtaagataattttcaattagaaaatatcttactgctgttctctatttatacaatacttcgtattgaatggcttcgctttcctagggtgccgtctcagcctcggtcttcgactggcactgctccctcaggagtctcgccattaatactacgtattaacatgtaattttactttgaaatactttaaaaaaataagacactttcgtataatttaataaataccactaaactaaattaacgaggtgccttatgtataaaaattataacatgacccaacttacactaccaatagaaacttctgttagaattcctcaaaatgatatttcgcgatatgttaatgaaattgttgaaacgatacctgatagcgaattcgatgaattcagacatcatcgtggcgcaacatcctatcatccaaaaatgatgttaaaaatcatcttatatgcatatactcaatctgtattttctggtcgtagaatagagaaattacttcatgacagtattcgaatgatgtggttagctcaagatcaaacaccttcttataaaactattaatcgttttagagtgaatcctaatactgatgcgttaattgaatctttatttattcagttccatagtcaatgtttaaagcaaaatcttattgatgataattcaatttttattgatggtacaaaagtagaagctagtgccaatagatatacatttgtgtggaagaaaagtattcaaaatcacgaatcgaaattgaacgaaaattcaaaagcattatatcgtgaattagttgaagaaaaaataataccagagataaaagaagatggagatagcgatttaacaatagaagaaatagatttaattggtagtcatttagataaagaaatcgaagatttaaatcattctattgagaacgaagattgtactcaaattagaaaacagacccgtaaaaaaagaactgagattaagaagttcaaaaagaaatttgatgattattccgaaagaaaaagtaaatatgaagaacaaaaatcgattcttaaagatagaaatagcttttctaaaactgatcatgatgcaacttttatgagaatgaaggaagaccatatgaaaaatggccaacttaagccaggatacaatttacaaatagcgacaaattctcaatttgttttatcctatgacctatttcaaaacccgacagatactagaactttaattccatttttaacaatgattcaaaataccttcggttatttacctgagtatattgtagctgatgcaggttatggtagtgagcaaaactatatggctattatagatgattttaataaaacgccacttattacgtatggcatgtttattaaagataaaactagaaagtttaaaagtgacatttttaacactcaaaattggaaatatgacgaacttaatgatgaatttatatgtcctaataacaaaagaataggttttaaaagatatgcataccgtaatgatagatatggttttaaacgtgacttcaagctatatgaatgcgatgactgttcagcatgttctttgaggcaacaatgcatgaagccaaattcgaaatccaataagaaaatcatgaagaattataattgggaatactttaaagcccaaattaatcaaaagctttctgaaccagaaacgaaaaaaatctatagtcaaagaaaaattgatgtagagcctgtttttggatttatgaaggctattttgggtttcactcgaatgtcagttcgaggaataaataaagttaaacgagagctaggttttgtattaatggcacttaatataaggaaaatagcagctcgacgagctgtatattatcaaatacatttaaaaaaagctgatttctatcaaataattaatagaaaacagcttttttacattgcctaagaactttatgtcccagcctgttaattttctagataatataaaagtgttcataaataaaacagtataggtaaacaataaagtattgaaaaaagtaagtttaatatgaaaattgttaaatgaacgacatcttttgtttttataaatatcaagaaaataatcaaactcaaaataaataacgtaactgtagtcataggcgtccatacataatcagcattagtcattaagaatggtgcggccattatgaaaaaatttataatgcagatgaaatagacaattagactataaattaggtaaataacaatacacacccttcataaataaataatttaaatcctatatattttaacaaaagtaaaacacagaagtgtagaaaataaaaaatattggtaaataaaatcaataagtttaaccaatatgttgctcgcttcataccgtatattgcaacaaaaattccgatcaagaaaaatatagcccctatgataaaacagaaatccgatgctgaattattaaaaaatgaggtgtttagagttagaaaatgagttaatgagttgactataactaataagatattaattatatttgtatggttcttcacatgatacctccaagtaaaaaaatctaattaataaagtgaatgcttgatgaacaagcagttattccaaacagaatcaataagaaaagtagaatcaacatgctaatgccccataaacaacccttttcactttcactattattaatttcttgacttcttttaaagatattattacttttatattctttagttgttttaaatttcacgtttttattacttccttttgtttaaaagtttacaatgaatttttgattataataatatattcaaaatagtactatctagtttgatatgtcaagcaatattattataaaattggaattctgagttgtctactctaatttattatatttacctataaaaatacacctcaaaaaatagatttttcagtctagcttttggggtgtacattccacacaaacatgtgattattttgatgtttctattaaacttgtaattttaaatttaaagtccctaaaaagtccctaaaattttattttatatgaggtattgttgataatgataaagttataaaccttgatattatgctgttttactttttgaatgataagtaattttatgttaaaagtctccagtaaggactaggtacagtcatagtacttcgagcaaaatttgttttgttattataaacaacacaaaggagataacttctctattgaagaagttaaaaacattatagcagacaatgaaatgaaagtaaattaaaaattcagaatatttttaattattatattgtgagtgatatttattagggaaagttattcttcatataaattagttaaatagtaaatctttgttagaactctttccatagagttgtgacagtatttttgttgtgctactatttttatagtctaataaatatataaaggggatggtttcgtgaataaaacggttaaagatttaatactagttgtcttaggttcatttatctttgctgcaggtgtaaatgcatttattatttctggtaacttaggtgaaggcggggttacaggtttagcaattattttatattatgcgtttcatatttcaccagccatcactaacttcttggtcaacgcagtattgattgccataggttataaatttttgagtaagagaagtatgtacttaactattcttgtaacaattcttatttcaatatttttgagtttaacagaatcatggcaagtagaaactggaaacagtattgtgaatgccatttttggtggtgtaagcgttggactaggaatcggagtaattatccttgcaggcggtacaacagcaggtacaacaattttggcgagaattgcaacgaaatacctcgatgtaagcacgccatatgctttgcttttcttcgatatgatcgttgttgcaatttcacttacagttattccacttgataaagtattagtaacagtaatatcactttatataggaacaaaagtgatggaatatgtcatagaaggtttaaacactaaaaaagctatgacgattatttcaactaatcccgacaaacttgccaaagcaatagacgagcaaattggaagaggtttaaccattttaaacggacatggttattatacgcgtgaagaaaaagatgtcttatacgttgttatttctaaaacacaagtttccaaagcaaagcgattaattaaacaaatcgataaagatgcattcctcgtaattcatgatgtaagagatgtctatggtaatggctttcttgcagatgaataaataaatggtatgagcacacatacttaaatagaagtccacggacaagtttttgaattatgaagacttatctgtgggcgtttttaattttataaaagtaatatacaagacatgacaaatcgagctatccaatttaaaaagtaatgttagtcaataagattgaaaaatgttataatgatgttcatgataatcattatcaattgggatgcctttgaaaattgataatttaaaaatagaaattatttttataaacagaaagaattttattgaaagtagggaaattatgaatcgtttgcatggacaacaagttaaaattggttacggggataacacgattataaataaattagatgttgaaataccagatggcaaagtgacgtcaatcattggtcctaacggctgcgggaaatctactttgctaaaggcattgtcacgtttattggcagttaaagaaggtgaagtatttttagatggtgaaaatattcatacacaatctacgaaagagattgcaaaaaaaatagctattttacctcaatcacctgaagtagcagatggcttaactgttggagaattagtttcatatggtcgttttccacatcaaaaaggatttggtagattaactgctgaggataagaaagaaattgattgggcaatggaagttacaggaactgatacattccgacaccgttcaatcaatgatttaagtggtggtcaaagacaacgtgtttggattgcaatggcattagcacaaagaactgatattatctttttagacgaaccaacaacatatttagatatctgtcatcaattagaaatactagaattagttcagaagctaaatcaggaacaaggttgtacaattgtcatggttcttcatgatatcaaccaagcgattcgtttctcagatcatcttattgcgatgaaagaaggcgatatcatcgctacaggttcaacagaagacgtattaacacaggaaattttagaaaaagttttcaatattgatgttgttttaagtaaagatcctaagactggaaaaccgttactggtaacttatgacttatgtcgcagagcttattcttaattaagtaagttaatatgataaaaaggacaattaacatgacaaatagagagaatccaacgccattgaagtttttatcctatattataggtttaagtatgatactactaatcacactatttatttctacattaataggtgacgccaaaattcaagcctctaaaattatagaggctatttttaattataatcctagcaatcaacagcaaaacatcatcaatgagattaggattcccagaaatatagcagcagtaattgtgggtatggcgcttgcagtttctggtgcgattatacaaggtgttactcgtaatggtcttgctgatccggcgctcataggtttaaattcaggtgcttcatttgctttagcattaacatatgcagttttaccaaacacttcatttttaatattgatgtttgctggatttttaggtgctattctaggaggtgctattgtattaatgataggccgatctagacgtgatggatttaatccgatgcgtattattttagcgggtgcagcagtaagtgctatgttaacagcgctaagtcaaggtattgcattagcttttagactaaatcaaacagtaacattttggactgctggaggcgtttcaggcacaacatggtcacaccttaagtgggcaattccattaattggtattgcgttattcattatattaacaattagtaaacaacttaccattttaaatcttggtgaatcattagctaaaggtttaggtcaaaatgtaacaataatcagaggcatatgtttaattattgctatgattctagcaggtatagcagttgctatcgctggacaagttgcatttgtaggtttgatggtgcctcatatagcaagatttttaattggaactgattatgctaaaattctaccattaacagccttgttaggtgggatactcgtgcttgttgccgatatgatagcacgatatttaggagaagcgcctgttggtgcaatcatttcatttatcggtgttccttactttttatatttagttaaaaaaggaggacgcacaatatgattagttcaaataataaaagcagacaatggatagcactggctgtttttagcattctactatttctaggttgtacttggagtattacctcaggtgaatacaacatacctgtagaaagatttttcaaaactttaattggacaaggtgatgccattgatgagttaatcttattagatttcagattacctcggatgatgattactattttggctggcgcagcgcttagtattagtggtgcaatagtgcaaagtgtcacgaaaaatccaatagctgaaccaggtatattaggtattaacgcaggcggcggatttgcaatcgcattatttattgcaattggtaaaattaatgctgacaactttgtttatgtactgccgttaataagtatactaggtggtatcaccgctgcattgattatttttattttcagttttaataaaaatgaaggtgttacacctgcgagtatggtattaataggtgtaggtttacaaacagcattatatggtggctcaattacaattatgtcaaaatttgatgataagcaatctgatttcatcgctgcttggtttgcaggtaatatttggggtgacgaatggccatttgtcattgcatttttaccgtgggtgttgattattattccttacttactatttaaatcgaatacactaaatattattcatacaggtgataatattgcacgaggtctaggtgtaaggttaagcagagaacgtttaatattattctttatcgcagtgatgttatcatctgctgctgtagcagtagcaggttcaatttcgtttatcggattaatgggcccgcatattgccaaacgtatcgttggaccacgtcaccagttgtttttaccaattgccattttagtaggggcatgtttacttgttatagctgatacaattggcaaaattatattacaaccaggtggggttccagcaggtatagtcgtagcaattattggtgcaccgtatttcttatatttaatgtacaaaacgaaaaatgtatagtgtcaaaggacacaacttattgctatgaaaggcactttattataaggcttttcatagcattttttatttaatgagccactcgatactatttattttttcaataatgaaccattaagtcatcaagacggtctgatcaaaaatatatttgataacggtatcaggttaattctttatgatagcgcattcatttattctgttttatactatgactgataataccaaggaggtacaacatgatgaaaaagttaatcaataaaaaagaaacatttttaactgatatgcttgaaggattgttaattgcgcacccagagttagatctgattgctaatacagttattgtaaaaaaagctaagaaagaacatggtgtagcaatagtctctggaggtggaagcggacatgaacctgcgcatgccggttttgttgcagaaggtatgctagatgcagcagtttgtggcgaagtatttacatcacctacaccagataaaatattagaagctattaaagcagtagatactggtgatggtgtattactagttgtaaaaaactatgcaggtgacgtgatgaatttcgaaatggcgcaagagcttgcagaaatggaaggtataaatgttgaaactgttattgttcgtgacgacattgctgtgacaaacgaagcacaacgtcgtggtgttgcaggaacggtgcttgttcataagcttgccggttatcttgctgaaaaaggttattcattaacagagattaaatcgcgtgtagaagcgttgttacctgaaattaaaagtattggtatggcaattgaaccaccgcttgttccaactactggaaaatatggctttgatattgaagacgacaaaatggaaatcggtattggtatacatggtgaaaaaggtattcatagggaagaagtaaaggatattgatcatattgttggaacattgttagacgaattgtataaagaagttactgccaatgatgtcatattaatggtgaatggtatgggtggtacgccattatctgaattaaatatcgtaactaaatatattcaacaaaatttggctgcaagaacggttaatgttgctaaatggtttgttggtgattatatgacatctttagacatgcaaggtttttctataactatcgtgcctaataaaccagaatatttggaagcatttttagcaccaacaacaagtcaatactttaaataagaagtgaatatgaataaatatacatttatgaggtggcacaaatgaaagtgaatgatatgaaagcacgtttattaaatttagaagaaacgtttaaaaaacatgaatctgaattaactgaattagatcgagcaattggtgatggtgaccacggggttaacatggttcgtgggtttagtagtcttaaagacaaacttgatgatagctcaatgcaatcattgttcaaatcgactggtatggcattgatgtcaaatgttgggggtgcatcaggaccactgtatggctttagctttgttaaaatgtctgcagtcgccaaagatgatatgcataatcaagatttcattacgctaattcaggcatttgccgaagcggttgaatcacgtggtaaagttactttaaatgaaaagacaatgtatgatgtagtagcgcgagcagcagagaagcttaaaaatggtgaaactttaacattcaatgatttacagcaattagcagataatacaaaagatatggtagcaacgaaaggtagagctgcatattttggagaagaatcaaaaggttatatagatccaggtgctcaaagtatggtttatattttaaacgctttgattggagatgaagataatgcctaaaattatacttgttagccatagtaaagaaattgcaagtggtacaaaatctttgttaaagcaaatggctggtgacgttgatattataccaatcgggggattaccagatggttcaattggaacttcatttgatatcatccaagaagttttgactaaattagaggatgatgcattgtgtttttacgatattggatcttcagaaatgaatgtagatatggcaattgaaatgtatgatgggaattatcgtgtgttaaaagttgatgcaccaattgttgaaggcagttttatcgcagcagtaaaactgtcaatcggcggttcaattgatgatgcactagcagaaatcaaacaatcattttagttaaaatttactaataatgaaaaatgtaaacctttttcaaatgaaactttataaaaaatatgatagtatatatgtaaatgtttaataaaatctggagaaataggaggacattgccatgcaacaccttataaaaaaacatgtattgaatggcgagtttgatttagtacgacaattgatgtccgaaacagattttatggaatttgaagaagcatatatttcaagtgcgcatgaagtagaaagtatgatgttttatacatgtattttagatatgattaagtatgaagaatcatctgaaatgcatgacttagcatttttattgcttgtgtatccactaagtgaatatgaaggtgctttggattctgcttattaccatgcagacgcttccataaaacttactgacggcaaagaagttaaaagtttgttacaaatgttattattgcatgcgataccaacacctgttatttcagataagaaggcttttgatatcgccaagcaaattttaaaattagatcctaataataatgttgctcgtaacgtcttaaaagacactgccaaacgtatggacaacgttgttgttgatataaatgaattacaccaacgtaatgcacgttaattacatttcaattatattagcttaataatagttttaacatttggttgggttgggacatatgttccagcctttttttatacttaaaaactaacgaagtaaacttgtgtgcacaaatggtttttatacaacattttataaatttatacattttaataaagaacatacgatagatagtttaaacctttttaactgagaaattttgatatgtattttcgaaatttaaataaaaatacgtaagtcaagaagcacaattattaatcatttttcctatacaaaagttcgtatgactgcattataaaagcataaatttataatttttttaaatgtcattgaacgtgataatgtgaatggattgagcaattttgaaaaagtgaaaaataacctatgcgacttgcaattaattttcagtacgttataatgcacactgtgcaaaattaaggaggtctattattcacatgatgatgaataaagaagcaacaaaaattggatttgcctacgtcggcattgtagtgggcgcaggattttcaacaggacaagaagttatgcaatttttcactaaatatggcttgtgggcttatttaggtgtcattatatctggttttattttagcttttattgggcgccaagtagcaaaaattggtactgcctttgaagcgacaaaccatgaatcaacattacaatacgtattcggtgaaaagtttagtaaagtctttgattatattttaatcttcttcttatttggtatagctgtaaccatgatagcaggtgcaggcgcaacatttgaagaaagttataacatacctacatggctaggtgcattaattatgacattagcaatttatgtaacattgctattagactttaataaaatagtacgtgcccttggtgtcgttacaccatttttaattgttttagttgtattaatcgctggcgtttatttgtttaaaggtcatgtttcattagcagaagttaaccaagtagtgcctgaagcaagtatctggaagggaatctggtttggtacaatatatggtggattagctttttctgtaggttttagtaccatcgtagcaatcggtggggatactgaaaagcgtacagtgtcaggtgcaggcgcgatgtatggtggtattatctatactatattactagcattgatcaactttgcattgcaaagtgaatatccaactattaaaaatgcctcaattccaacattgacgttagcaaataatatccatcctttaatagcaacagtgttatctgttattatgctggcggttatgtataatactattctaggactaatgtattcatttgcagcacgttttacagaaccatacagtaaaaaatatcatatctttattattataatgatggtagcaggttatttattaagtttcgtaggatttgctgaattaattaataagttatatacaattatgggatatgtaggcttatttattgtagtagctgtaattattaaatatttcaaacgtaaaaatgcggataaaaaacatattgcttaatatcatatgatggatatccgaaactttacaattgaatcactttgttttaaccttaaaagcaattcgtctctactcttatcgggcgaattgctttttatatttattcagtctattaatatgagcgtctaacaaatagagaggtacgatgtaatgaataaagataataaatggacgatgataactgcgctttttatagctgtaatcagtgtattgttagcatttcatctgaaacaacattatgaccaaattacaaatgagaaccatgctaataaagacaaaattaatattaaaaataaaaatgtgcgcatttatcaaaaccttacatacaatagagttttccctaacagtaaattagatattattacacctgttgatatgtcttctaatgccaaactgccagttattttttggatgcacggtggtggttatattgcgggtgataagcagtataaaaacccattattagcgaaaattgctgaacaagggtacattgttgtgaatgtaaattatgcattggcgccacaatataaatatcccactccattaattcaaatgaatcaagcaactcaattcattaaagaaaataaaatgaatttacctattgattttaatcaagtaattattggcggtgattctgcaggtgctcaattagctagccaatttactgcaatacagacaaacaatcaattaagagaagccatgaaatttgatcagtcattcaaaccatcgcaaattaaaggtgctatactatttggtggtttttataatatgcaaacagttagagaaactgagtttccaagaatacagttatttatgaaaagttatactggcgaagaagattgggaaaagagttttaaaaatatttcacaaatgtcgacagtaaaacaatcgacaaaaaattatccaccaacatttttatctgttggagatagcgatccattcgaaagtcaaaatatagaattcagtaagaaattacaagaattgaatgtaccagtagatactttgttttatgatggtacgcatcatttacatcatcagtatcaatttcaccttaataaacctgaatcgatagataatatcaaaaaagtgttacttttcttaagtcgtaatacatcttctagtggtattcaaactgaagagaaaccacaaatagaaaatccgagtaatgaattaccgttaaatcctttaaactaatgataaacagtagtaatttattacttaagcaacatttaagatcttcaaattgaaaacgaagaatttaaaacatgtggggctaatgtgtaagagtctgagatataataaattgttagcggttctttatcatttctatctcaccctattatgatgtgacatttattttacaaactaatttgttttgaacctgaaaataactttttacaactaaattgtcgaaaaacagtgtgtacatgatataataaatttataaattgaaaagaattcaaaagaaaaattaaaatatagattgagcacgaagtgatttgaaataaggttgtgaaagggaatgacaaggtcagccattaaaaccatttaaaaataaacgcgttatggttactggacgtatacaacgtgttttgtttaaaaattatttagatagacatagcgcatttaagccgaatgtaaggatattattaaaagatgtatttgtttcaggtgtatcaatagatcatttatggttatatgagacaaataaatactatgcattggcaatggaacttattcatcaacgagtaaaatttagtgcgaatgttgtaccatattacaaaataaatagaaataataatttattcgtacaagattatggaattaagcgtaaaagtaggttaattactgaagaagcttacaatcaaaacaatcagtatcaggataagatatatgaaaaattaccggatatagattttagactcgaagatttttatagtaaggaaaactaaataatatataaagcaccactaagcgtagttgatagttgatcaattacacattagtggtgctttattttgaatttaaatttgataaatgaataagagtgcacgtatttatttgagattagataacattgataagtatgagtaatgtattaggtaaccattaaattcgttgttatacgattctgatacaagattatgataaaatagctttaattaagaattttagccatcatatagtcatcataatatttaccatcgataaataacttatcttttaaaacgccttcgatttgaaaatcggcacttttaaaaagctcgagggcaggttggttattgagtggtacatttgcttcaattcggtgtatttgattatttaaacaccaagccataatggcatcaagaagtgcttggccaattccacgatgttgatataatttctttacacctaaatcaattttagcaacatgtttaatgcgttgaaatggtgtcgtattaacaaaggcaaagccaacgagttgttcatcactttcagcaacaaagatgactttatgtggagaagtgatatattcttctaattgtttactagctgatgtgacgctaggatcatattctcctggtgtgtagaacatatacggagattcatcgtatattttcgctaacattgaaatgaaattttctacatctttgatactaactctacgtataatatgggccataaaaagcctccagtattttgaaattttaaaacatttgctactattataatatatatgtaactaaaaggtggagtaatatgttttttggttacagtttaaaggagtattttagatgaaacctaaagttttattagcaggtggaacaggatatattggtaagtatttaagtgaagtgattgaaaatgatgctgaactttttgctatatcaaaatatccagacaataaaaaaacagatgatgttgaaatgacttggattcagtgtgatatatttcattacgaacaggttgttgccgcaatgaatcaaatagatattgctgtattctttatcgacccaacaaagaattctgccaaaataacacaatcatcagcaagagatttaacattaatcgcagcagataattttggtcgagcagcggctatcaatcaagtaaaaaaagtaatctacatacctgggagtcgttatgataatgaaacaattgaacgcctaggtgcatatggtacaactgtagaaacaacaaatttagtttttaaacgttctttagttaatgtagaattacaagtttcaaagtatgatgatgttagatcaacgatgaaggtagttttaccaaagggatggacattaaagaacgttgtaaaccactttattgcatggatgggttacactaaaggaacttttgtgaaaacagaaaaatcacatgatcaatttaagatatatattaagaataaggtacgaccgctcgcagtatttaaaatagtagaaacagctgatggaataataactttaattttattgagtggaagtttagtgaaaaaatatacagttaatcaagggaagttagaatttagattaatcaaagagtcggcagtcgtttatatacatctatacgattatatccctcgattattttggccgatttattactttatacaagcaccaatgcaaaaaatgatgattcatggctttgaagttgactgccggattaaagattttcaaagtcgattaaaatcaggagaaaatatgaaatatactaaatgatattgggtgatatggatgcaaatactactagtagaagatgacaatactttgtttcaagaattgaaaaaagaattagaacaatgggattttaatgttgctggtattgaagatttcggcaaagtaatggatacatttgaaagttttaatcctgaaattgttatattggatgttcaattacctaaatatgatgggttttattggtgcagaaaaatgagagaagtttccaacgtaccaatattatttttatcatctcgtgataatccaatggatcaagtgatgagtatggaacttggcgcagatgattatatgcaaaagcctttttatacaaatgtattaattgctaaattacaagcgatttatcgacgagtgtatgaatttactgctgaagaaaaacgcacgataacatggcaagatgccattatagatctatcaaaagatagtatacaaaaaggtgaacagacgattttcctgtctaaaacagaaatgattatattagaaattcttattaccaaaaaaaatcaaatcgtttcgagagatacaattatcactgcattatgggatgatgaagcatttgttagtgataatacgttaacagtaaatgtgaatcgtttacgaaaaaaattatctgaaataagtatggatagtgcaatcgaaacaaaagtaggaaaaggatatatggctcatgaataatttgaaatgggtagcttattttttgaaatctcgcatgaactggatattttggatattgtttttaaacttgcttatgttaggcattagtctaatcgattatgattttccaatagacagtttattttatattgtttctttgaatttaagtttaacaatgatttttcttatattgacatattttaaagaagtaaaattatataagcattttgacaaagataaagaaatagaagaaattaaacataaagatttagcggaaacgccatttcaacgtcatacagttgattatttatatcgtcaaatctcagctcacaaagaaaaggttgttgagcaacagttacaattgaatatgcatgaacagaccattacagaatttgtgcacgacataaaaacacctgtgacagctatgaaattattaattgatcaagaagaaaatcaagaaagaaaacaggcattactatatgaatggtctcgtataaactcgatgctagatacacagctgtatattactagattagaatctcaacgcaaagatatgtattttgattacgtgtcacttaaacgcatggtcattgatgaaatacaattaacaagacatattagtcaggttaaaggtattggttttgatgttgactttaaagtggatgattatgtttatacagatataaaatggtgtcgtatgattattagacaaattttgtcaaacgcattgaaatatagtgagaattttaatattgaaattgggacagaattaaatgatcaacatgtttcgttatatattaaagactatggcagaggtattagtaaaaaagatatgccgcgaatatttgaacgaggatttacgtcaacggctaacagaaatgaaacgacgtcttcaggtatgggtctatatttagtaaatagtgtaaaggatcaattaggtattcacctgcaagtcacgtcgactgttggtaaggggacaactgtcagattgattttcccattacaaaatgaaattgttgaacgcatgtcggaagtgacaaatttgtcattttaaacatgcgttttgttacttagaattgatacatcaatgcagcttcaacgttataataagatagatgttagtcatatgttaaattgaagatacaagtgccaaagcctaaaggaaatgaagttaagataaattataggagtgttaaagtggcaattttagaagtaaaacaattaacaaaaatatatggaactaaaaaaatggcacaagaagtgttgcgagatatcaatatgtctattgaagaaggcgagtttattgctattatgggtccctctggatctgggaaaacgacattattaaatgttttaagttcaattgattatatttcacaaggttctattacattaaaaggaaaaaaattagaaaagctttcaaacaaggaattatctgatatacgcaagcatgatattggttttatttttcaagagtataatttactgcatacattgactgttaaagaaaacataatgttaccactaacggtacagaagttagataaagaacacatgttaaatcgttatgaaaaagtagcagaagcattaaatatattggatattagtgataaatatccttctgaattgtctggtggacaaagacaacgaacatctgctgcaagagcgtttattacattaccttctattatatttgctgacgaaccaacaggtgcactggattctaaaagtactcaagatttattaaaacgattaacaagaatgaatgaagcatttaagtctacaattattatggtaacgcatgatcctgttgcagcaagttatgccaatagagtagtgatgctaaaagatggtcaaattttcactgaattataccaaggggatgacgataaacatacctttttcaaagaaataatacgtgtacaaagtgttttaggtggcgttaattatgacctttaacgagataatatttaaaaatttccgtcaaaatttatcacattatgccatctatcttttttcattaattacgagtgtagtattgtattttagctttgtagcattaaaatacgctcataaactaaacatgacagagtcatatccaattataaaggaaggctcacaagtcggaagctactttctatttttcatcataattgcatttttgttatatgccaatgtgttatttattaaacgacgaagttatgagcttgcattatatcaaacattaggtttatctaaattcaacattatttatatactaatgctcgaacaattactaatatttataattacggcaatattaggtattattattggtatttttggttcgaaactgttattaatgattgtctttacattattaggaattaaagaaaaggttccaattatttttagtttgagggcggtatttgaaacattaatgttaatcggtgtcgcttattttttaacatctgctcaaaattttatattagtgttcaaacaatctatttcacagatgtcaaagaataaccaggttaaagaaacaaatcataataaaattacatttgaagaggttgttttaggcatcttaggtatagtactgattaccacaggatactatctctctttgaacattgttcaatattatgattctatcggtgtgcttatgtttattttattgtcaactgtgattggggcatacttattttttaaaagctctgtttctctagtttttaaaatggtgaagaagtttagaaaaggtgttataagtgtaaatgatgtcatgttctcatcatctattatgtatcgtattaagaaaaatgctttttcacttacggtcatggcaatcatttcagcgattactgtttcagttctttgctttgctgctataagtagagcgtccttatcaagtgaaataaaatatactgcaccacacgacgttacaattaaagaccaacaaaaagctaatcagttagcaagtgaattaaacaatcaaaaaattcctcatttttataattataaagaagtaattcatacgaaattgtataaagataatttatttgatgtaaaagcgaaagaaccatacaatgtaacaattactagtgataaatacatccctaatactgatttgaaacgtgggcaagctgatttgtttgtagcggaaggttctatcaaagatttagtgaaacataagaagcatggtaaagcaattataggaacgaaaaaacatcatgttaatattaagttacgtaaagatattaataaaatctattttatgacagatgttgatttaggtggaccaacgtttgtcttaaatgataaagactatcaagaaataagaaaatatacaaaggcaaagcatatcgtctctcaatttggattcgatttgaaacataaaaaagatgctttagcattagaaaaagcgaaaaataaagttgataaatctattaaaacaagaagtgaagcgataagctcaatatcaagtttaaccggaatattattatttgtaacatcatttttaggtattacattcttgattgctgtatgttgcattatatacataaagcaaatagacgaaaccgaagatgagttagagaattatagtattttgagaaagcttggatttacacaaaaagatatggcaaggggactaaagtttaaaattatgtttaattttgggttacctttagttattgcactatcacatgcatattttacatcattagcatatatgaaattaatgggtacaacgaatcaaataccggttttcatagtaatgggattatacatttgtatgtatgctgtttttgcagtgacggcttataatcattccaagcgaacaattagacattccatataaaatatacagatggctttcagtagagtagtggattcggattcacgaactatactggaagctttttattataaatgaagagaagttatatttttagcatgtatagttgaatactgggttaaaataccatattaataatgaagtaaaggtatgagtgattatgaaagtgttttgaatgaaatatatttaattggtgatgcttttaattgaaaagattaacaggattcaactttgtaaattgtattaaatgtgagaaaataaaagtatattcattgagagatatatgagtcaatgatcgttttaaacaagataagtgtattttaatatgtaaaagttatgtaataaatattgtatcgttgcaaatttcccaactatattcatttacaatttttagagttgtatagataaaaaattgcctatacaataactttttcaaaacaaatgcctactactatttaaattttatgtaaaagttaagtttcggaattgttaaaaatttgtaaattgaattgtgggattgtaaattttgtgctattttcatataagggcaaatacagtaaattgtttactgtgaggcatttttgaaattaatatcagtacactaaaattatactgacgattgataataacaaatttgtatcattagtttgtaaattcacttgtcttaatttgaaacaaattataactgaatgtgattggtgacaatcgcttaaatggaggattttaaatgtttagtaagaaaaaagataagtttatggttcaattagaagagatggttttcaatctggatcgtgctgctattgaattcggtaaaatggatttcaatactcatttagatttaaaagcatactcagacaacattaaaacttatgagtcacatggtgacgaattagtacatcaagtaattactgatttaaatcaaacatttatcacaccaattgaacgtgaagatattttatcattatgtgatgcaattgatgatgttttagatgcaattgaagaaacggcagctatgtttgaaatgtattcaatcgaatacacagatgaatatatggctgagtttgttgataacattcaaaaagcagttgcagaaatgaaacttgctgtcggcttattagtcgataaaaaattatcacatatgcgtattcattcaattaatattaaagaatttgaaacaaactgtgatggtattttaagacagtcaattaaacatattttcaatagcgaaacagatccaatcacattaattaaaataaaagatatttatgaaagcatggaagaaattgctgataaatgtcaaatcgtagcaaataattttgaaactattattatgaaaaatagctaaggggagtatatatttatgtcatatataatcatcgtcactatagctgtagttattttctcgctgatatttgactttatcaatggattccatgatacagccaatgcagtagctactgctgtatctactagagcgttaacgcctaaaacggcaattttaatggcagcagtgatgaactttataggtgctttaacatttacgggcgttgcaggcaccattactaaagacattgtcgatccatttaaattggaaaatggattagttgttgtgttagctgctatacttgcggctattatttggaatttagctacttggttttacggaattccaagttcgtcttcacatgcacttataggttcaattgcgggtgcagcaatcgcatctgaaggctcatttggagtgttacattaccaaggtttcacaaaaattattattgtattaatcgtttcaccgattatcgcattttgtgttggtttcttgatgtattcaatttttaaagttatctttaaaaatgcaaatttaacaagagcgaatcgtaactttagatttttccaaattttcacagcagcgttacaatcattctctcacggtacgaatgatgcgcaaaaatcaatgggtattattacgttggcattgattgttgctaatgtacagaatgatggtagcgttgaaccacagctatgggtaaaatttgcctgtgcgacagcaatggggcttggtactgcaattggtggctggaaaattatcaaaactgtaggtggtaatattatgaaaatacgtcctgcaaatggtgcagcggccgatttatcatctgcattaacaatttttgttgcgtcatcgctacatttcccattatcaacaactcacgttgtgtcatcatcaatcttaggtgttggtgcttctaaccgagctaaaggtgtaaaatggagtactgcacaacgaatgatcattacatgggtgattacattacctatttcagcattgttagcaggtttattattctatatacttaacttatttttctaattgaaaataaaactaaactgaacttcagtatcacaaaaatatggtggtattgaagttcattttttatgtaaatagataacatattttgtagaatttacatagaatgaccaagacaaagcattttaatttgaggctatgttataaatgtattccatggaacataatcagttaggtcattaaatcatatgtaagagcaaaataatgatttaatagtttatattcttcaatgaatgaataattaaatagctatcaacttgtttaattaacctaaattgtattggactttatttaatataaatttgtatatgtagacgaaaaagcgtaaaatactggtataacaaattaaatcattatatagtcagcttagttgcattattttgatttttaatatattatgcatttaatttaatcaaataggtaggttattattttttacctaactaccattcatacaaaatataaataagtatgatagggaagggtgagataattttttgtaccaaaatgaaaatttttttcaaaaataaaaaactagcaatctcacatgatgtgaattgctagtatatatcagtacaatttatttaattaatggatgaatgcatagctagaaacttctgaagctggaatagtacgatagttcatattgtatggaccatatgtgtaattcatttcagaaatcaagatactaccatcaccattgacacgttcaacataagcaacatgaccatatggaccaggtgtgctttgcataattgaaccaactgatggtgtgttgtttacttggtaaccatcattagctgcgttaccagcccaatacttagcgtctgaccaatatgtgctaattggactaccagcttgagcacgacggtcaaatacgtaccatgtacattgaccagcagtgtataaattttggtgattaaaagatgatgcattgccattgctacctgttgtagctgttggtgttgtaccacctgatccaccattaggaatttgtaatgtttggttaggcataattaaataaccacgtaagttattggctgccattaattgatcaactgaaacaccatatctgctagcaatgatatttaatgattcaccagcttgtacagtatgagatgatgctgaaccagcttgtggagaagtgtttgacgtattttgagcatcacttccacctactgagataacttgaccagggaataccaagttgttatctaattggttattttgtttaatactctctaccgaagtgttgtatttttgagcaatactccataatgattcaccagattgtactgtatgttgtgtagaagcttgtgcatcatgatgcgttaaaaatgcagctgcaccagatgttgctgttattgcaaatgctaattttttcaaagggactcctccttaaaattaagatttactacttttaaaaattattaagacaatttatatagtaaattaagttttcgttttatattacgctttccatattatcaaaaataagtagctttgtgtggtttgttattatcttgtaatattattaacattttaggatatcggttcatatttttataaatgttgatttgatagtgtataaaagcgttttagtgattttaactaattataaaaaattatattttgtaacattgtaaaatgtaaaatcactatacttgttaaaggttatttcttttgatgaagcaaaatttactgtaaaatttgacgcataaaacgacagtagaaggaggaattattttgtcgcaaaatacaaatcattcatattatcatcaaaaccaacatgctcaatcaataagtaaagtgtggctttattttatgtattactggattatatttggtataggatgctatctaggtcagtttttaccattaagttggcgacaacccttgtcatttggattactgattattattttagcaacacttgtttttgaaagagcgagacggttcggtttaattatttcacatatttacgctgtagtaattggcttattgtcatacgcaacgtttaccacgtatttacaaaatttaggaccagatattttctataaaaatatcgcattagcaatttttgcatttatagcatttggtattattggttatttcttcgttggagatgcatcgagtataggcaagtatttattcgttacattaataacattaattattgcgagtctaattggtatttttcttcaaaatcctattttttatactattattaccgtcgttagtctgttgttatttctactttatactttgtatgattttaatcgtttaaaaagaggtgactattcaccaagagaaatgggatttaatctatttattaatttgttgaatattattaaggatatactttatcttgctaatatgttcagaagataaacagttaaattaataaagaaatttgtataaagttttggaataatcaataatgaatatcaaccttaatttggagcgattgtcataatttagaaatttagatagagattttactgataaagcaataaaaatatattaccttaaattgtaaaaatattattaatcattgaaatgattaactgctatagttctaaagtaaacaaatcttagaagataaactttaaacaggtgtacttgcctttctaattacacttttattagaaaagtaaagtatagctacgtattaattttaaaatcgaaatattaataggaataagtatagataatataaacaatttaatgttagtttgagctcatctcaaaagtagaatgtgatttaaataagtgtttatttttaaattgaaaatgaatataaaactaacaaaagataatagtaatacgttgtagatgtggtcatttaaaattattttgaaaatactaaaaagtagtgtgttttcaattggatagtttaattaaactggctacatctatttttgtaatatttaaatgattgatatataagtttaaaaattacccattatatagttttatttatttttgatttggtattcgtattgtgttaaatttacgtttaattaaataagttaaatattatagggaatgataaaagtggtacttaaatatagaaagaggtaaagttatggcaaaatcatgcttgcatatacttactaataatgaatatgcgacaacgcgttgccaagatggcatagtcttattttggccaattgacggggaaatcgaactacaaaaatttcgtaaaagtaaaataattgaagatgatatatatattattaatcatctggatgtatttagtattaagaataataaaaaaacgatcatgttgtatttgagtagcgattggtttgcggaattaggctttactttctttaattaccactatacagcaaagttaattaaatcatcctataatttgaaatgtctactattaaaattgacttatcgataccttgataatcaacctctcaatgacgctgatgttagaaaattacaggatattattaaaattattgcaaaagaagcaagtatggataaaaagattgcgcaaaatcaatatcgatatgcctattatggtgatttgcgtgacgagctcgaatatatttatcaaaatgtaaatcaacgattgacattaaaaagtgtcgctgataaattatttgtttcaaagtcaaatttgtcatcacaattccacttacttatgggcatgggttttaaaaaatatattgatactttgaaaattggtaaatcgattgaaattctacttactactgatagtactattagcaacataagtgaacatttaggttttagtagtagctcaacttactctaaaatgtttaaaagttatgtggatataacaccgaatgaatatcgtaatttatcaaaatataataaatgtttaatgctaaagccagaaccactagtaggcaaaatggtgcaagaagtaaaagaaatcatattgaattatattgaacattataaaaaccacctaactgatgttatacatattgatgaagacaaatttgaaacacctaaattgtttcaaacggttattcaaataaatacttatacagaaatgaaattagttttcttagaaggaatctttaaaaccttattgaataagaacagtcaagttgtctttttcatcatgccatcgattttaaaaagtaaaaataccatgtccgaagaagaaaaattcgcaatcattaaaacaataattgagagtgatttaaagatagcatttaatataaatgatattgaaacaacttattatgttgaagaagcttttatgagtgtttttagacaaatatctccaaacgaattaagtaatcataataattacgaagtgcattttgtttttgatttatcattgatggaaattagaacaatttatcgaatgatattaaaattacataacatcatgttgaatgtgaaattaggattgaacattacctgtttatttgaaaaaccttcagtttttaaatcactagtatcacaaataaagcgacttaaattcgattcgttaataatagataatgcaaatttaagtagcccttatttgatgggtgaaagtgatgagttactattgaaaaatattttgcattttaaaaatttaaaacaagtaattaatgaattggatattgaacaagaaaagctgatttttttaaatgttgaaaatcataaactgattaataataaagaacgagatttaagtaatagtgctccattgatttataagacattaagtgcgctgtatcacaactttgatgggtttggattgaacatttttgacaatcatcaagcatttaatgcgatgcatctatatgacaaaaatggatttaagacaacactaggtcttatattggaaaaatttatcgaatatgtctcgaaaccaaaatatgaaaacagttattattctatttttgatatagagaattattattgtcttgttatttatgattggcgagtgatagagagcgagacaattatgagtaattttgaggatagtcaagtttatataaattttaaaaacaatgttttaaacgataaatatctaattgtaatagaaacattggacgaaaatagtggcaacattaatcatttgatttctaaagaattaagagataaatatgaatggaaccctagtttactatctaaaattgacaactaccttaaacctgcaatcgagattaaagagcataactttagtaataattccttaaatattaacgttacttttaatgcgttatacataattaaaataggaaaaaaataacaccttgatatgtattgcaaaatttaatttgcatttgttggtaattttgacaacgtattaaaaacaaatgagaaagacaatggcagaaaaatttaagataataatgacagaagcattgtctttatatatttgggggtgcaacattttgaatactgagaaattagaaacattgcttggcttctataaacaatataaagcattatctgaatatattgataaaaaatataagttgtcgctaaatgatttagcagtcttagatttaacgatgaagcattgcaaagatgagaaagtacttatgcaatcatttttaaaaactgcaatggatgagctagatttaagtaggacaaaattattagtttctataagaagactaattgaaaaagaaagacttagtaaagttagatcatctaaagatgagcgtaaaatttatatttatttaaatgatgatgatatatctaaatttaatgctttatttgaagatgtagaacaatttttaaatatttaattgaaattgagtgtcgaaagcatagaaattgcttatcggcacattttttatatatacatattttaaaactaagtaacagattgaagaaatcgtaattcaataatgttaattgtgaaaatgtatataatcataaaaaaatcatgtataatatatgttgttaattaaacagttcgaaagcgagatgacattatgggacgtaaatggaataacattaaagaaaaaaaggcccaaaaagataaaaacacaagtagaatatatgcgaaatttggtaaggagatttatgttgcagcaaaatctggtgaacccaatccagaatctaaccaagctttaaggttggtgcttgaacgcgctaagacatattcagtgccgaatcatattattgaaaaagcaatagataaagctaagggtgctggagacgaaaactttgatcacctaagatatgaaggatttggacctagcggatcaatgctaattgtcgatgcgttaacaaacaatgtaaatcgtactgcctctgatgtgcgtgctgcttttggtaaaaacggcggtaatatgggtgtatctggatcagttgcttatatgtttgaccatgtggcaacatttggtattgaaggaaagtctgttgacgaaatacttgaaacattaatggaacaagatgtagatgtaaatgatgtgattgacgataatggattgacaatagtctatgctgaaccagatcaatttgcagtcgttcaagatgcgcttcgtgcagcaggtgttgaagaatttaaagttgctgaatttgaaatgttacctcaaacagatattgaactttctgaagcggaccaagtaacatttgaaaaattaatcgatgcattagaagatttagaagatgtacaaaacgtattccataatgtggatttgaaataatgaaatcagcagaacaatggattgatgaattgcaacttgaatcacatcctgaaggtggtttctatagagagacaattcgagaagtattgaaagatggaagcagagcgccgtttagtagtatttattttttacttacagatgacaatatttcgcattttcatcgaattgatgctgatgaagtatggtactatcatgctggtgattctctaacaattcatatgataaatccggatggggaatatacgactgcaacattgggtactgatatccaaaatggagatgtattgcaatatgtagtgcctaaaggaacaatttttgcttcttcaatcgaaatttcaaatacttatagtttagtaggttgtatgtgtcaaccggcatttgagtttaagcagtttgaattgtttaagcaatctgaattaattacacaatatccgcatcttaaatcagtgattgaaaaatatgctttaaaataaaaatgatcaatgaagtggtttgaaggttgttaataaacctttgagtcacttcatttttgtatgtattcttgattgaatcataatagaattgatgctacagctttttctaatgaaattaacattaaatgattttgaaaacgataagaccatattatttataattttgaaaaatcattgttatgaagaagtatgtgtactatctaattaatattgtctattttaagtaaattgaagcgagttgtagtaaaataataataaatattttcatatgattaacaaaaactataaaactgtatcatgacatgacatcattcatgtagttttatataataatgacaaggagttggtgactgtgaaagtaaagtatatagataaacgtcactggcgtcgcctaattgatagggaatacacagaggtaaaagttaataataataggttcaagggtattataggcttagtcacgatgaaaaaggttcgtgatcctttagaggtgacggtagttggacaaaatatcattgtcgcagatgacaattataaatggttgcaaatactacctgaaaagaaacgttatagtataactgtaatgtttgataataaaggcaatccattagaatattattttgatataaacatcaaaaatataacgcaaaaaggtaatgcgcgtacagtagatttatgtttagatgttttagcattaccaagtggtgaatatgagttggtagatgaagatgatttaatgtttgcattagaaagtgagcaaattacaaaaaagcaatttcatgaagcatatatgattgcgcatcaaattatggcagagttagaaaatgattttaaaggattccaaaagaaaatcatgtactgctttaataaaattaatgcaaaggctcaaaaaaatcatcaaaagccacaaaataaaactaattttgaaaaaagcaaacaaataaaacctaagcaatataatcaaactaaaaatcaccaacaacaaaagaaaaactaagtaattcaagctgcagccataccaataaaattggtgaaattattcgttagtaatgaactcatgaatgcttgtagccatgaaagttcaataattgaataatttatggggggaaattatgaagattgaagactatcgtttactaataacattagacgaaacgaaaacgttacgtaaagcggctgaaattttatatatatctcaacctgctgttacacaaagactaaaagctattgaaaatgcttttggagtagatatttttatcagaacaaaaaaacaattgattacaacaactgaaggaacaatgattattgagcatgcccgtgacatgttgaaaagagagcgattattttttgacaaaatgcaggcacatattggtgaagtgaatggaacaatatcaatagggtgttcttcattgattggacaaaccttacttcctgaagttttgagcctatataatgcccaatttcctaatgttgaaattcaagtacaagttggttcaactgaacaaattaaagcaaaccatagagactatcatgttatgataactcgtggaaataaggtaatgaatttagctaacacacatttatttaatgatgatcattattttatttttccaaaaaatagacgagacgatgttacaaagttgccattcatagagtttcaagctgacccgatttatataaatcaaataaagcaatggtataacgataatttagagcaagattatcatgcaactattacagtggatcaagtggcaacttgtaaagaaatgttgattagtggtgtaggtgttacaatcttgccagaaattatgatgaaaaatatcagcaaagaacaatttgagtttgaaaaagtagaaattgataatgaaccgctgattcgttcaacgtttatgagttatgatccgagtatgttgcaattgccacaagttgattcttttgtaaatcttatggcgagctttgttgaacaaccaaaggcatagtcttagactaatttaaggtgttagtatttaattttaaactattcggttaaattgaacgcagttggttgctaatgcatcaacagcaaaagatcccctaattaataaattaaaaggggactaaaggaatacagttggttgctaatgcatcaacagcaaaagagcccctaattaataaattaaaaggggctctaagaagcggggttatggatatgtttgcagcgttattacaaataaagaattataaactctttgttgctaatatgtttctactaggtatgggtattgcggttacggtcccatatcttgttctttttgcaactaaagatttaggtatgacaacaaatcagtatggattacttctagcatctgcagcgattagccagtttacagtaaattcaattattgctagattttcggatacgcatcactttaatagaaaaattattattattctcgcattattaatgggtgcgcttggtttttcaatatacttttttgtagatacaatctggttattcatattactatatgcgattttccaaggattatttgcaccagcaatgccccaactttacgcatctgctagagaatctatcaatgtttcaagctctaaagatagagctcaatttgccaacacagtattacgttcaatgttctcattgggctttttatttggtccatttattggtgcgcaattaatcggattaaaaggctatgctggattgtttggtggaacaataagtatcattttatttactttagtacttcaagtgtttttctataaggatttaaacattaaacatccgattagtacgcaacaacatgttgaaaaaattgctcctaacatgtttaaagacaaaacgcttttattaccatttattgcatttattttattacacattggacaatggatgtatacgatgaatatgcctttatttgttactgattatttaaaagaaaatgagcaacatgtcggttatttagctagtttatgtgctggtttagaagtgccatttatgatcattcttggcgttttatcatctagattacagactcgaacattgttgatttatggagcgatttttggtagtttattctacttcagcataggggtatttaaaaacttctatatgatgttagcaggacaggtatttttagctattttcttagcggttcttttaggaattggcattagttatttccaagatatcttaccagatttcccaggctacgcctcaacacttttttctaatgcaatggttattggacagttaggcggtaacttattaggtggtgctatgagtcactgggtaggtttggaaaatgtattttttgtatcagcagcatcaatcatgttaggtatgatacttatattctttactaaaaatcaaaaaattacaaaagaggatgtgatatcaacatgacaattattttatggctacttatcatcgctgccttcatgttagcatttgttgggttgattaagccggttattccttctgttttagtattatgggttggctttctaatctatcaatttggctttcataatcagcatttatcatgggcgttttatgtatctatggcattgctaacaatattaattttatgtgcggactttttagctaataaatattttgtgaatcgcttcggtggttctaagtttggagagtatgcagctttaattggtgttgttattggatgttttgtattaccgccatttggaattattattataccttttattttggtattcatagttgaattaatacaaggctattcatttgaaagagcagttaaagtaagtataggttcaatcgtagcatttttaacaagtagtatagctcaagcaatcattatgtttataatgattgtatggttctttatagatgctttattgattaattaataaaaagcttattgcaaaatatgtttttcggtaactgtaatttagtgattttatcattaacagtaccaaattagcatatgatgtaataagctttttgtttataaaaatgtatgagaatgttttttcgaaatatttctttcaatgcgtaatccaataggcataactataaatgaaaatataataaatacccaattgcttacctgaatatatggtccaaaggcaagtaatgattgtggaataaagaatacatagaaaaatcctacaattagtagaatgattgccaaataggtgaatatccatatccaatttgaattgttaaaacactgcagttgtattgttttaaaactaaaccatataaataaaaagacaataaagaatccaacgactactgaaaacggaaatgaaacaaaatataaattacttccacttttttccatgaaaaatcctaaaaatcctttgagaaaactaacaatcccaattaatagaacgatgtgctgatatatatatttaaaaatatttttaaatgtctcattaggcatcgcttttagttcttttattgcatgtgcttttgggtcgtgattgaaaaaatctaaggctaataaaccatgttgttctgcgcttaataattgtttaagtatacggttaataattaactctgtatcatgaggattgacgcgaaagtcagagcgcatataagtcatataattctcgaagatttctctatcagtattgcttaatcttaatgatttaacattattttcttttgttaattgcgcagtacttttcattgttacttaagcgctcctttaaaaatgtttaattccaaattaaaatggaaatgattttatagtattaataaggtcaatcatatcatattaaacgcataaatataacgattaatattggagaggaaaatgaggacacttaataaagatgaacataattatatcaagcaaatagctaatatacatgagacattattgtcgcaagcagaatccaactataaatgtactaaactgagtattgctcttaggtacgagatgatatgttcaagattagaacatacaaatgataaaatttatatatatgaaaatgaaggtcaattaatagcgtttatttggggacattttagtaatgaaaaaagtatggttaacattgaactgctatatgttgaaccacaatttcgcaaactgggaatagctacgcaactgaagattgcgcttgaaaaatgggctaaaactatgaatgcaaagcgaataagcagtacaattcataaaagtaatttgccaatgatatctttgaataaagatttaggttatcaagtgagtcatgtgaaaatgtataaagatattaattagaattaggattatgttgctaattcatgttaaaattaaaaaagatttaatgacgttaaggagttttatatgaagaaattaatcatcagtattatggcggtcatgctatttttaacaggttgcggtaaaagcgaagaaaaagcatctcttgaaaaagatatcgataagttagaaaaagaaaacaaagaattaaaagataaaaaagaaaagctaaaacaagaaaaagataaattagaagacaaacaaaaagatcttgaaaaagaagtgaaagatctaaaaccttctaaagaagataacaaggatgataaaaaagacgaagacaaaaataaagaggcatcacaagataagcaatcaaaagatcaaactaagtcatcggataaagataatcacaaaaagcctacatcaacagataaagatcaaaaagctaatgacaaacaccaatcataattgaattgcttacttgttatagatgaaaggtacagcgttttaaaccttattttaagggtatgtattaattaaaatgtggtcatgattgaaacagaacgtaaaaatagacaacgtaattaataaaggagagaaacggcatgcatgaacaagattttagaattttagagggtcaagatattactttgccagaattaggtagagaattagaaaatattacagggcgcacgattgctgattctactggcgaaattaagcgtgtaattgcacatttaccaaactttgagtccgatacagatacttttgttgctacatatcgtttaaaccatcaacaagattttatagatgcaacttttactgcgctgaaatcagatagagcacgtttaaaagaagtgccggttcatgttgaacttataagctatatttctaaatcaaaataaactgctatctaaaacgcaaagttgatcaaaagatcgattttgtgttttttattgagaaattatataggagtgtcaatcgatgatttattgtgaaacagagcgtttaatattaagagactggcatgaagatgatctgttaccttttcaaaaaatgaatgcgaattatgacgtacgtaaatattttccaagtttattgagttatcgtcgttcagaattagatatgagaactatggatgcggttattaaagattatggcattggattatttgctgtagaagataaagagtcccatcaatggataggctttataggtttgaattatattccagaaacaagcgattatccatttaaagaattaccgctttatgaaataggttggcgcttgttgccagaattttggggaaaaggattagcaactgaaggcgcaaaggcaacgttgaagttagcagaagaacatcaaatatacgatgtctatagttttacagcagaagcaaataaagcttcacaacgtgtaatggaaaaaattggcatgacagtgtatgatcatttcgaattacccaatctaagtaagtatcatttattaaaaaggcaagtgcgctattacattaatcttcgaaagtgaaaaatttatacataagcgtaacaaacacccctaacattgtttagctgatgataacaatattaggggtgtttgtttattttttaaccttagaatgattaatcgtatgaacgagtacctagaggtttgaaatttaatattgattctattaatgattccttagtgtcgcataacggtgcaagtgcacgatactttggatcaataaaaccttcctcaatcatatggtcaatcattgtttgtagtggattgaaaaagccattaatattataaatggcaataggcttttcatggatacctatttgagcccaactatacatttcgaaaaattcttctagtgaacctgcgccaccaggagccatgacaaatgcatctgcaagttctgccattttatttttacgttcatgcatagaatcaactaaaattaattcagttaaacgttggcttgtgatttcatgttcatctaacattttaggcatgacgccaatagctttgccgccatgatctaatacaccatcttgaatggcacccataataccaattgaccctgcaccaaatactaattcataaccttgttcagcaaaatatttacctaaatcgtatgctttttgtacatatgaagggtcatgacctttgcttgcaccacaataaactgcgattcgcttcatattaatccagctccttaattcgatgaatgacttttaatagtgattgttcaaacactttttgatcttgctttgtaaaaggtgggggacctttgtggcgaccaccttgttttctaatttgtgcattcatatatcgtttatctaatagttgttgaatatttttggaattgtatatcttcccattatgatgcatgacaattaagactttgtcgactaataaacttgcgagtccataatcttgagtgattacgatatcatctttcgttgataattgaacaattttgtaatcaactgcatctggtccatcatcaacatataatgttgatacatgtgggggatataattggttcgaaaaatggctgaagctccgaataattgtcacaaaaatgcctgtctcagttgttaaatctataatagaatcaacaacaggacaagcatctccatcaataataatatgtgtcacaattatgcctctgtattgttttctttattttgttgagaggcgcttttggcaacataatctttatattttttaaatgacttgatgcgtgctttatcagcttcttgttggcgtttttgttcttctttgtgtcgtttttcaatatttttttgtaactttttattcattttagcgatttctttgcgatttttttcagctagtttatcgccttttttctcagttttctcatctaatttattaggtgttaagcctgcttttacttcgtatttttgtgactttttcatatctttaatacgttgtatttcattcttttcgcgggctttttgctcttctttatgacgcttttcgatatttttttgaagtattttattcattttatcagcgtctttacgattttgtttagctaatttttcgccttttttctcaatataggcaggatcgtgttctctagcaaactttttaagttcacgcttattttcaaaatcttgctttttatcgccgacatattctttaacatcactcgctgtgttactgattgctgcagatgtttttgaagcaactttacttgtagcatctgtaactttttgtacgtccggatgttgtttgatacgtttacgttcaacaattaacggtaccaatacaattggtaatacattaatcataaatttgatgacttttttcttatccatagaccttgcctccataattactttattaattttacataccctatgatacatcaatataaacgatgagagtagtgaatcacttataagtatttcagatgtttttaaaagaagacaataaaaactgccaatcaagtggttccttaattgacagtctatattttaaaaggaaattaaatacctttaccaatgccaaatccgaagtaaagtatagcaataaagattactaagacaattctgtaaatggcaaatggaattaatttgattttgttaattagatgcaagaatgttttgattgcaattagtccaacagtaaatgcagctaaaaagcctaaaatataaaaaggtatatcagcaatctgaatatcttgataatgttttaataaagataaaccactagctgctaacataattggaacagccataataaatgtgaagtccgatgctgctttatgatttaatttcattaatacaccagttgaaattgttgagcctgaacggctgaaaccaggccacatagctactgcttgagagataccaattacaaacgcttggaaataattgatttgatccactgtttgtggatttttaactttaactgaatacttatcagcgataatcatatagatagcacctacgaataagccaatcataacagttggcacactaaataaatgttcttcgatgaaatcatcaaatagtaagcctaaaatacctgctggaaccatacccactaatacatgtaataaatttaaacgtcttggctttgaacgtctttgttgatcgttttgtccttcaacatgtttgtgtttaccaatatgtaaaatctctaagaagcgttcgcggaacacccatgctgctgcaaagacggatcctaattggatgacaattttaaatgtaaatgctgattgagaacctaaaaattcagatgattttaaccacatatcatcaactagaatcatatgtccagtagaggaaacaggtgcaaattctgttaatccttcgacgacccctaagataataccttttattaattcaatgataaacataatgtacccactttcattactcaatttaatttatttaaatatcaaaattaccatatcatgatagcatattcatttaaagacatgctagttatagttataatactagactaaagatgtatatattcattttcttttacatgtaaaactacaatattttattgagctatttaatttgattttaaggaaaaccttttataataggtttaggtgatataattgtgaaaaaattaacaacaatactgtttcaatataaaatttttccggtactcatgttcttggtcagtactggtctcggcatactcgttataacgcaaaatattttaatagcagattttttagctaaaattataagacatcaatttcaaggtttatggattgtattatttattttattaggtgttttacttttaagagcaactgtgcaatttctaaatcaatggttaggtgatacattagcatttaaagttaagcatatgcttagacagcgggttatttataaaaataatggtcatccaatcggtgaacaaatgactatactcacagaaaacattgacggtctagcacctttttataagagttatttgcctcaagtgttcaaatcaatgatggttccgctcatcataatcattgcaatgtttttcatccatttcaatactgcattaattatgttaataactgcaccatttattcctttgttttatattattttcggtttgaaaacgcgagatgagtcaaaagatcaaatgacttatttgaatcaatttagtcaacggtttttaaatattgctaaaggtttagtgacgttaaagctatttaatcgtacagagcaaacagagaagcatatttacgacgatagtactcagtttagaactttaacaatgcgcattttacgcagtgcttttttatcgggattaatgctcgaatttataagtatgttaggtattggattggttgcattggaagcaacgctaagcttagtagtatttcataatattgattttaaaactgcggcaattgcgattattttagcgcctgaattttataatgcaattaaggacttaggacaagcgttccatactggaaaacaaagtgaaggtgccagtgacgttgtgtttgagtttttagaacaaccgaacaataataatgaatttctattaaagtatgaggaaaatcaaaagccatttattcagttaacagacatatcatttcgatatgatgattctgatagattggtattaaatgatttaaatttggaaatatttaaaggtgatcaaattgcacttgtaggtccaagcggggcaggtaaatccactttgacacatcttattgcaggtgtttatcatccaacaataggtactataagtacaaaccagcgtgatttaaatataggaatacttagtcaacagccatatattttcagtgcttctataaaagagaatattacgatgtttaaagatatagaaaataatattgttgaagaagtgctagacgaagtaggtttattagacaaagttcaatctttcacaaaaggcattaatacaataataggtgaaggaggcgaaatgttatctggtggacagatgagacgcatagaactttgccgtcttttagttatgaagccagatctcgttatatttgatgagcctgcaactggtttagatattcaaacagaacacatgattcagaacgttctgtttcaacattttaaagacacaacgatgattgtcattgcacatagagataatacaattcgccatttacaacgacgtttgtatatagaaaatggaagactgattgctgatgatcgcaatatttcagtaaatataacagaaaatggtgatgacttatgaaaacacgactaaaatttcaagtagataaggatttattgttagctatagttgttggtgtttgtggaagtttagttgcgctcgccatgtttttcttaagtggttatatggtgacacaaagtgcacttggtgcgccactatacgctctgatgattttagtcgttacagtaaaattgtttgggtttttaagagctattactcgatacgtagagcgccttatttctcataaagctacatttacaatgctacgtgatattcgggtacagttttttggtaaattagtaaatgtcattcctaatgtttaccgtaaactgagttctagtgatttaatttcacgtatgattagtcgtgttgaggcgttacaaaatatttatttacgtgtttattatccaccagtcgtcatcggtttgacagcgctagttacagtaatagtattggcgttcatttcaatcggccatgcgctattgattatggttagcatgttgtttactttactcatcgttccttggttaagctcaaaaaaagcacgtactttaaagaaacatgcagctaatgaacaggctcgatttttaaatcatttttatgattataaagctggtatggatgaactacgtcgatttaatcaaattaatcattatcgagataatttgatggataaattaaatcattttgataaattacaacttaaagagcaacgctttttaacgatttatgattttatattaaatattattgctatgctttcgatttttggtagtttagttctaggattaattcaaattaatgaaggccaactcaatattatttatatgacgagtatcgttttaatgatcttaactttatttgaacaagctgtaccaatgacaaatgtcgcgtattataaagcggatactgaccaatcattgcacgatattaatgaagtgatatctgtaccttctactaatggaaataaacgccttaatgataagtatgatgcaacgaacatttatgaagttaaggacgctagttttaagtattggaaccagcaaacgtatgtgttatcggatattaattttaatgttaatagaggcgaaaagattgcgattgtgggtccttctggttcaggaaaaagtacattactacaaattatggcagggttatatcaattagatagtggctctattcgtttcgaaaatatggatatgtttgaaatagatgacaaagataagtttgaatcgttgaatgtcttgctacaatctcaacaattatttgatggtacaatacgtcaaaatttatttaccgatgaaaaagatgaagcggtgcaagcaatatttaagcaattagatttagaacatttggcactagaacgtcaaattgacttagatggtcatacattatctggcggagaaattcagcgtttagcgattgcgaggatgttattaaaagatactgcatcaacatggattttagatgaaccaacaacggcattagataaacaaaatagtttaaaagttatggatttaattgaagcacatgcagaaacattaattgttgctacacacgatttaactttattgtcacgttttgagaccatcattgtgatgataaatggtaaaatagttgaaaagggaaactatcaacaattactcgctaatcaaggtactttatggaatatgattcaatataatgcataaaaaaactgcttgataggctaagaaacctttcaagcagttttttaactaacaagcttacgcgtgctaattgtttttctattcttaataaattctaaacattactttaattgtcatgacaaaagttaattatttttcctttgtttcatcaaatgcatgaatgactttacctaataagcgattaagttctttaacttcatcttgagataaagaagaagctgaagcgactttgtcagatgcattacttaattctggtctaatagtttcacttttgtcagtcaagtgaataaatacttcacgttgatcgacttcggaacgttcacgcttaattaagtctacttgttccattcgttttaataatggtgatactgtaccagtatcgagtgctaattcagttacgactttcttgacgtttacaggagattcatcccataaaatagttaagacaagaaattgtgggtatgttagattgtacttcttaaaaactttgttagagtagtagcgattaacttgtctttgagcattgtacaaactaaagcatagctgttcttttaaattatgttgatcagacattaaagttctcctccagacatactatccgtttttttctcttttcggattggtaatcattaaaaagttgattgtttattaattcacaactttctttgattcaatgccatgctaaaattaaagtatgtttaaagtttagaagatatttttgattaaatcaagcaaaaagataatttaatatatatgttatcatttttaaaaataactgtaatagaaaagagaatataaaatgaaaaataataaagatgaaaaaataagaatatccataattaacggatttttgggtagtggtaaaaccacgttactgacacattatattagtgaattattaaaaaatgatgagaaaattaaaatcatcatgaatgaattcggtacttttgatattgatagcaatagtatttcgaatgaaattgaagtccattcattgattaatggttgtgtttgttgcgatcttaaacaagaacttgtctatgaactaaaagccattgctttaaaaggggacgttaatcatgtcatcatagaagcgacaggcattgcgcatcctttagaattactagttgcatgtcaagatccgcaaatcgttaatttctttgaaaagccaattatttatggtgtattagatgcgattcgatttttggaacgtcatcaatataccgaaaatacagtttcgctgatggaagatcagttgaaactaagtgacatgattattattaataaaattgatcttgtaactgatgacagtcttgagaaaattgataagcaattaagtatgatttgtgcaagtattccaacttataaaacaacctatggacaagtttcgttggaagaattggacttacctggtaaagacagagagatatcgtctcatcatcaccatcatcatgggattaaaagtatgacttacacatttacaggtccgattgatcgtcaattgttttatcaattcataatgaaattaccggaatctgttctacgtttgaaaggttatgtatcatttagagatcaaccaaatgcaatttatgaatttcaatatgcatatggtttaccagactatggaataattggcatggaattaccattaacgattgttattattggtgaaactttagatacaaatcacatacgtaatcaattggatatgctacaatttacgtaaatcagaaaatgtgttgtttcaatttaacggaaatagcacattaatttcttaatacttttattgtgaatattttgtgacattgagggatggagtggatgagatatggaacaaataatgattaatcactatgttcatttttctaggcttgtacaaggtttttggcgtgcaaatgaatggaagatgactgcgaaagagttaaattattttataaacgaattagttgaacgtgggattacaacgatggatcatgctgatatttatggggattatcaatgtgaaacactgtttggtaatgctttggatttatcacccgaattaagaaataaaattcaaattgttacgaaatgtggtatcattttgccttctaagcaatttgattttacaaatggacatcgttatgatttgagtagtaagcacatcgtgaaatctgttgaacagtcattaatcaatttgaatgtagattatttagatagtctactcattcatcgtccttcaccattgatggatccagaacaagttgttgatgcattaactaaacttgttaaacaaggtaagttgaagtcattcggggtgtcgaattttaatcattctcaataccaattgttaaatcaatatattatgaaagaaagactacatattagcatcaatcaattagaattatcgccatatcacgttgatagtttacaagatggaacaatggattcaatgtatcaaaaccatgttcaaatcatggcttggagtccttttgcaggcggtaaaattttcgacaaggaagatattaaagcgcaacgtattatgaaagttattcaatcaatagctgacaaatatggtgtgagtgacacagctgtgatgatagcatggttagtaaaaataccgcatcgtatcatgccgatacttggaacaagtcagttaaagcgtattgatcaagcaatcgaagggctgcaacttaatttagatgatcagtcgtggtttgacatttacaccgctattatcggacaagatattccgtaatcttatttacttttaaatcataaaggagcatatcatgacaaacgaagataaacgtttcgaacaattaagatttgaacgcaaatttatagttattccgtatgtaatttatgcagtcattgtattactattaaatattttctattctgatttgaaaataacaatgacattattcggacttttctttgcgtataatgtagtcattttgttcatagcatttattaaacattataaacgcacattgttactaagtcttatattaacagtgcttagtggcgcggcattctttggaattatttatgtttatggcattaatcatttttaaatattaaaaagagactatctacaataatctcatttgcattttatctaactaagtttaacttttgcttagaaaaatgatgttatgaggatattcagtagatagtttttttatgttctaatatttaaacttagatatctttttgtaattaactgagataacgcatcacctagcaatattatttacaaaatatttcgataaaattgtgtattttgcataaattaaaaatgtatgttttaaaaaattgttataattaaattaagataaaacaaaggggtgactgttatgtcagaagaaaaaaaggtagttaaacatgaacgacaaaagaatgaaaagacaaaaaagcaatacaagccattttggattgttatgagttttataatacttatagttgtactattactcccagcaccttcaagtctgccaataatggctaaggcagtactagctattttagcttttgcagttattatgtgggtaacggaagctgtatcatatccggtgtcagcaactttaattattggcttaatgatattacttttaggatttagcccggttcaaaatttaggagaaaagctgggtaacccgaaaagtggtagtgctgttttaactggaagtgatcttctaggaacaaatcatgcattatcattagcgtttagtggatttgcaacatcagctgtagctctcgttgcagccgcattatttttggctgctgctatgcaagaaacgaatttgcataaaagactagctcttatagtgctatcaattgttggtaataaaactagaaatatagttattggagcaattattgtttcaattgtacttgcatttttcgttccttctgcaacagctagagcaggggcagttgtaccaatcttgctgggtatgattgcagcatttaaagtttctaaagatagcaagttagcgtctttattaataattacttcagtacaagctgtgtcaatttggaatattggtatcaaaacggcggcagcacaaaatatcgtagcgattaattttataaaccatcaattaggatttgatgtttcatggggcgagtggttcttatatgcagcgccttggtccatagttatgtctatagctttatatttcattatgattaaagtgatgcctccagaaattaatacaatagagggtggcaaagatttaataaaagaagaattgcataaacttggccccgttagcgcacgtgaatggcgattaattgttatatcgatgttattattactgttttggtcaactgaaaaagtattacatccgattgactctgcatctattactattattgctttaggtgttatgttaatgccgaaaattggtgtcatgacatggaaacatgttgaaaataaaataccatggggaacaattatcgtgtttggtgtaggtatttcactaggtaacgttcttttgaaaacaggtgcagctcaatggttaagtgatcaaacttttggtgttttaggtttaaaacatttacctattatcgcgacaattgcacttatcacgctttttaatatattgattcatttgggctttgcgagtgcaacaagtttatcatcagcgttaatacctgtttttatttcgctaacctctacgttacacttaggagaccagtctataggatttgttttaattcaacaatttgttattagttttggtttcttattacctgttagtgcacctcaaaatatgttggcttatggcactggtacttttacagttaaagatttcttgaaggcaggtataccattgacaattgtagggtatattctagtgatagtttttagtatgacttattggaaatggttaggtttgctttaatttaaaatataaataagaatctaggttattttaaagtgacaaaaagcttaataaaataaaaagataattgaagggtgttttgtttatggcaattgctgtgttattaaatcgaatgtttcgaatagaacacaatccattatttgaatatatttatcaaaaaaaagaagacattgatgcatgttattttatcattccggaagaggacatgtcttcagcttctgatttgaaagcacagttttatcgcggtactttgcagcgcttttaccaatcgttgcacgcagaaaagctcacaccttatgtcatgtcttatgacgatatcatttcattttgtaaagaaaacaatatctctgaagtagtgattgcaggtgatattatgagttatcaccttgaagaatatgatattttacatcaacgctctttattcaatgatgcacatattgccgttactttgatacgtgggaatcattactttaaagcgagtaaaacaatgaatcaacaaggggagccatacaaagtttttactagtttctataaaaaatggcgaccttacttgaggcatagagacgtatatcactatgatttaaaatcattcgaagacttcgtcattgcatcacctgatgatttagtgtttgatgacatagcatttggatcctcacaaataattgaacagaataaatggcaacaatttttagaacatgatatacagaattatgaaaatggcagagaatatttaccagaaatattaacaagtcaattaagcattgccttagcatatggcttattagatattattgaaattttcaatgatttgttatcacgatatgaagaagatgagtcaaactatgaagcgtttattcgggagctcatttttagagagttttattatgttttaatgacacaatatccggagtctgcacatcaatcttttaaaccgaaatatcgtcatattaattggtctgaaaatgaagcggattttaaagcttggtgtgatggtcaaacgggatttccaataattgatgcagcaatgatagaattgagacaaacaggttttatgcataatcgtatgagaatggttgtgtctcaatttttaacaaaagatttatttataaattggacatggggagaggatttcttcagaaagtatcttatagattatgatgcagcatcaaatgttcatggttggcaatggtctgcatctactggtacggatgcggtgccgtattttagaatgtttaatccaattaggcagagtgaacgctttgatcctaaagcattatatatcaaaacatatcttccagttttaaatcaaattgatgcaaagtatttacatgacacacatcgaaatgaatctgaattatttaaacaagggattgagttaggtcgtcattatccaaaacaaatagtggatcatcaagaaaagagatctcaagttttagcgacatttaaaacattagactaattgatctgatttgatggtccaactaaaataaaacaagctaactaagacatgttttgccatagttagcttgtttaaattgttctatcggattatgtcagtaaacatagtgaaatatagcaagacatattccaaaaatgtaatgatataaatatactttagtcttatttttatatgttgaggaacatcccatttaggatattgtcgttcgaaataaatcatttgttgaacaaaaacgcctatacctagcggaaataacatcagcagaatacttcttatgtaacttaaaccaatatcatgccataggtgtccaataatcatttgaagaacgatgattgatatcataaaaacggttatatctaaagtcactttttcaatctaactccttttccgaataataaaatagctgcttgcatcataaccataaagcatacaaatattgctgtgtcgattgttaaactttttagaatgtgatttaagacgcgtattggttcattaaagaagtatacggaatgtaagcgtaagaaacgcccgatataaatgccgaagccatttaaaaacataagaattacaacaattattctattaagccatggatgagaagtaagcgttaaaatttcaaaatagattaaaatcattacataaattgctaaaaagacacctaacagtaaataagtaaagtacttccattcaaataagttaagccctgcataaaagttaaattgaaattggtttagatgaattaaatcagttaccatataaaatgtgttaggtaaaagtaatacaaatataaagctatatatgacgaagagcggccattcatattttttattgggtttaaataaacgcaaaagtaggcttagctcaaaaggtatatatgctaaaaataaatttaatgtcataaattgatatattttattctcaaatagtgacgcaataaataatactaaaaagtaaattctagcgatgtatcgtgaattcataaatgatatacactactttctaatgaaaaaagttattcatattaatgtggtaattataattacattcaaaactttatttaaaggtttatttactatagaaatatctaaaccaaagtgcgaatgcatttataattaaacacttatgataacgtttgagttgatgtgtttcaactaaaaagtaatgtgttattgtggatcaagtaaatttaaaccaactgcatcgttgaatgaacgttgaatgtccaaatcagttacagtaagcacaatttcagctgtagcagaaacaatagcttttgataaatgtccgctaaaagtttcatatgattgcgtaccaaatgttgcatgtaaatgtgcaaaatgtccattatctagacgagaaatattacctaataagctcgtcaattccagtggctcagaaatatgtttttcttcatattgtttcgttgttaaattgaaaaattttaaaacgacgtcatcacatgcaccaatgccgctgacagatgtaaatgttaagtcttggtcatctgcaaagtttgttatacattcaacgatatcttctcctttttctaacactagtagtatagtatgattacttttttgcaatttcatatgatcaatcccctttattttaatatgtcattaattatacaattaaatggaaaatagtgataattacaaagaaaaaaatattgtcaaatgtagcaatattgtaatacaatatagaaactttttacgaatatttagcatgaattgcaatctgtcgtggaaaagaaaaataacagctttaagagtgacaagtagaaaaaagaggtgagcaaatgaataaacagattttggttttatattttaatattttcttaatttttttaggtatcggtctagtgataccagtcttacctgtttatttaaaagatttggggttaactggtagtgatttaggattattagttgctgctttcgccttatctcaaatgattatatcgccattcggtggtacgttagctgataaattaggaaagaaattaattatatgtataggattaattttgttttcagtgtcagaatttatgtttgcagttggccacaatttttcggtattgatgttatcgagagtgattggtggtatgagtgctggtatggtaatgcctggtgtgacaggtttgattgcagatgtttcaccaagccatcaaaaagcaaaaaactttggctacatgtcagcgattatcaattctggattcattttaggaccagggattggtggatttatggcagaagtttcacatcgtatgccattttactttgcaggagcattaggtgttctagcatttataatgtcaattgtattgattcacgaccctaaaaaagtttcgacaaatggattccaaaagttggagccccaattattaacaaaaattaattggaaagtctttattacgccagcaattttaacgctcgtcttagcgttcggtttatctgcatttgaaacattgtattcactatacacagctgacaaggtaaattattcacctaaagatatttcgattgctattacaggtggcggtatatttggggcacttttccaaatatatttcttcgataaatttatgaagtatttctcagagttaacatttatagcttggtcattattatattcagttgttgtcttaatattattagtttttgctaatggctattggtcaataatgttaatcagttttgttgtcttcattggtttcgatatgatacgaccagccattacaaattatttttctaatattgctggagaaaggcaaggctttgcaggtggattgaactcgacattcactagtatgggtaatttcataggtcctttaatcgcaggtgcgttatttgatgtacacattgaagcaccaatttatatggctataggtgtttcattagcaggtgttgttattgttttaattgaaaaacaacatagagcaaaattgaaagaacaagatatgtagcataagtattttggtgtatatcgatataaagtaaagcgtaatattatgaataattagcatcgtttttcttatgaattttattaagaaaattcgatgctttacatttaaaaagattcgattgactaaatgttttactctttatatttaaatgttatatgtaacaaaaaatgattttgagtaataaacatgttacaaatattacattctttttaaattgcaatccacatacctaattcattaacgttaatgtgttaagatgataaaaaatgagtaaggaaatgtgggtaaggggatgacagtaaaaaatttatttttaggctttgttgctgtaatattaaccgtatgtttgattggtttattaatattagcaacaaatgaagatgcgcttgctaaggtacataaaacgattaatacgcttaacgcgataaatgtatcaactgaagatacttataaaaagaaaatggatattctcaatattcatactgctaaagcatctgaaatgaatgaaaatgcgaaaaagcaaaatcattttaaacatcgtgtgaatgcaaataaatcaaattcttttaacgaacaagagtgccaagttattgctgatcgttatgcagataagcatatcaatgataattatggtctagaaagaatttctaagacaaatcatggatataattatgtttattccaatgataattcaactagtaagcaacatgtaagtatttcaaatcaaggcataataacgaaataatagatggaacggtgtattctaattggatatactgtttttattttgcaataatttaatttaaaaagctgaaatcaacttataaaatgatgtaaatgttatgtcaatatcaaccaatccgtaatgtattttaaaatgttaatatagttctgaagaagtataaatgaggtgttgaaatggctaaaaataagaaaacgaacgcgatgcgtatgcttgatcgtgcaaaaattaaatacgaagttcatagctttgaggtaccagaagaacatttatctggccaagaagtcgcaaaactcatacaagcaaatgttaaaacagtttttaaaacacttgttctagaaaatacaaaacatgaacattttgtatttgttatcccagtaagtgaaactttagatatgaaaaaggcagctgctttggttggagagaagaaattgcaacttatgcctttagataatttaaaaaatgtaacgggatacattcgtggtggatgctcacctgttggtatgaaaacattgtttccaacagtcgttgacaaatcctgtgaaaattatagtcatatcagtgtgagtggtgggcttcgaacaatgcaaatcacgatagctgttgaggatttgattacaataactaaaggcaaaattggagcagttatccatgaatgattaataacaacaaaaagtatggggcaagattaggagtgtgacagagatgaaatttttataaaattcatttctgccacactctttttgattgaattagcattttacgatcataaacaatcatgataattgagtatttgaacataaaaatgtaattttatcgtcacaatttgattgtttgtgattgtttttggtaatttatgattgaaaagtgaaagcgtactcattataatacaaagtgagatggggtgatgatgataattacagaaaaaagacacgagttaatattagaagaactttcgcacaaagattttttgactttacaagaattaatagatcgaactggatgcagtgcttcaacaatacgaagagatttatctaaactacaacaattagggaaattacaacgtgtgcatggtggtgcaatgttaaaagaaaatcgtatggttgaggcgaatttaactgaaaaattagcaactaatcttgatgaaaagaaaatgattgctaaaatagcagctaatcaaatcaacgataatgaatgcttgtttatcgatgctggttcatctacattggagctaattaaatatattcaagcgaaagatatcattgtggtaaccaatggtttaacacatgtagaagctttacttaaaaaaggtattaaaacaattatgctaggtggtcaagttaaagaaaatacacttgctacgattggttcaagtgccatggagatattaagacgatattgtttcgataaagcttttatcgggatgaatggattagatattgaacttggattaactactcccgatgagcaagaggcattagttaaacaaacagcaatgtcattagccaatcaatcatttgtacttatagatcattctaagtttaataaagtatattttgctcgtgtacctttgctagaaagcacgacaatcatcacatctgaaaaagcattaaatcaagaatcgttaaaagaataccaacaaaagtatcactttataggagggactttatgatttatacagtgactttcaatccttcaattgactatgtcatttttacgaatgattttaaaattgatggtttgaacagagcaacagcaacatataaattcgctgggggaaaaggtattaatgtctcacgtgttttaaagacattggatgttgagtcaactgctttgggatttgcaggtggatttcctgggaaattcattataaatacattaaataacagtgcaattcaatcgaattttattgaagttgatgaagatacacgtattaatgtgaaattaaaaacaggacaagaaacagaaatcaatgcaccgggtcctcacataacgtcaaaacaatttgaacaactgttacaacaaattaaaaatacaacaagcgatgatatagttattgttgctggaagtgtaccaagtagtattccaagtgatgcgtatgcgcaaattgcacaaattacagcacagacaggtgctaaattagtagtcgacgctgaaaaagaattggctgaaagcgttttaccatatcatccactatttattaaacctaataaagatgaattagaagtgatgtttaatacaacagtgaactcagacgcagatgttattaaatatggtcgtttgctagttgataaaggtgcgcaatctgttattgtctcacttggcggtgatggtgctatttatattgataaagaaatcagtattaaagcagttaatccacaagggaaagtggttaatacagttggctctggtgatagtacagttgcaggcatggtggctggaattgcttcaggtttaacgattgaaaaagcattccaacaagcagtagcatgcggtactgccacggcatttgatgaggacttagcaacacgggacgctatagaaaaaataaaatcacaagttacgattagcgtacttgatggggagtgaaaataatgagagtaacagagttattaacaaaagatacaatagcaatggatttaatggcaaatgacaaaaatggtgttattgatgagttagtaaatcaattagacaaagcaggtaaattaagtgatgtagcgtcatttaaggaagcgattcacaatcgagaatcacaaagtacaactggtatcggagaaggtattgctattccacatgcgaaagtagccgcagttaagtctccagctatcgcattcggtaaatctaaagaaggtgtcgattaccaaagtttagatatgcaaccagctcatttattctttatgattgcagcgccagaaggtggtgcccaaacacatttagatgctttagctaaactatctggtattttaatggatgaaaatgtacgtgaaaaattattacatgcatcgtctccagaagaagtgttagcaattatcgatcatgctgatgatgaagcgacaaaagaagaagaggcagaagctgaagcacaacaagttgctgctgtagaagcaaatcaagacactaatggatcaaacgagccatatgtattagctgtaactgcttgtccaacaggtattgcacacacatatatggcgcgtgatgcattgaaaaagcaagcggataaaatgggcattaaaattaaagttgaaacgaacggttcaagtggtattaaaaaccatttaacggaacaagatattaaaaatgcaacaggtatcattgttgctgctgatgttcatgttgagacggatcgcttcgatggtaaaaatgtcgtagaagtaccagtagcagatggtattaaacgcccagaagaattaattaataaagcattagatacaagtcgtaaaccttttgttgcccgtgatggtcaaagaaaaggtaactcaaatgacagtcaagaaaaattaagcccaggtaaagctttctataaacacttaatgaacggtgtttctaacatgttgccacttgtaatatctggtggtattttaatggcaattgtatttttatttggagcaaattcatttaatccaaaaagctcagagtacaatgcgtttgcagagcagctttggaacattggtagtaaaagtgcattcgcgttaatcattccaattttatctggatttattgcacgtagtattgcggataaacctggattcgcttcaggtcttgtaggtggtatgttagcaatttcaggtggttcaggatttattggtggtattattgcaggtttcttagcaggttacttaacacaaggtgttaaagccatgacacgtaagttaccacaagcattagagggattaaagccgacattaatttatccactattaacagtgacagctacaggcttattgatgatttatgtctttaatccaccagcatcttggttaaatcatttgttattagatggattaaacaatttatcaggttctaatattgtattattaggtttagttattggcgctatgatggcgattgatatgggcggtccattcaacaaagcggcatatgtttttgcaacaggtgcgttgattgaaggtaatgcagcaccaattacagctgcaatgattggtggtatgattccaccgttagcaattgcgacagcgatgttaattttcagacgtaaatttacaaaagaacaacgtggttcaattatccctaactatgtgatgggtatgtcgtttattacagaaggtgcgattccatttgcagctgccgatccattacgtgttattccttcaatgatgattggttcaggtataggtggcgcaattgctttaggcttaggttctcgaattactgcgccacacggtggtattattgtaattgttggtactgatggtgcacacttacttcaaactcttattgcacttctagttggtaccttagtttcagcattaatttatggacttattaaaccaaagttaactgaaacagaaatcgaagcttcaaaatcaatggacgaatagttttaatgatttaaagtgattgttagcaaagagcttcatattaagttgtaagttcaatgaatatatgttagttttatatatcgtgttaacggtagcttatacaaagctgtaaaaacactttctattaattcagtttttatgaattgatatgaaggtgtttttatttttagataaatgaatgaagaaatagacaccacaaatgtatagacttttttaatattttgcaaaaagttatgccaaacgaagcagatatagtaaaatatgagtgtcttaaagtgaaaatttataaataaagaagggtttatacgtgtcagaattaattatatataacggcaaagtttatactgaagatggcaaaatcgataatggttacattcatgtgaaagatgggcagattgttgcaattggagaagtaaatgataaagcagcgattgataatgatacgacaaataaaattcaagtgattgatgcaaaaggtcatcatgtagtgccaggttttatcgatatacatattcatggtggttatggacaggatgcaatggatgggtcatacgatggcttaaaatatctatccgaaaatttgttgtctgaagggacgacatcatacttggccactacaatgacgcaatcgactgataaaatagataaagcacttataaatattgctaaatatgaagtggagcaagatgttcacaatgcagcggaaattgtaggtatacatttggaagggccatttatatctgaaaataaagttggtgctcaacatccgcaatacgttgtacgcccatttatcgataaaattaaacattttcaagagactgctaacggattaataaagattatgacgtttgcacctgaagttgaaggtgcaaaagaagcgcttgaaacgtataaagatgacattattttttcaattggtcatacagtggcaacatacgaagaagcagttgaagctgttgagcgaggagctaaacatgtcacgcatttatataatgcagcgacgccattccaacatagagaaccaggtgtttttggagcagcatggttgaatgatgctttacataccgaaatgattgttgatggcacacattctcatccggcatcggttgcaattgcttaccgtatgaaaggtaatgaacgtttttatttaattaccgatgcaatgcgtgcaaaaggtatgcctgaaggagaatatgatttgggtggtcaaaaagtaactgttcaatcgcaacaagcacgtcttgcaaatggtgcgcttgctggtagtattttaaaaatgaatcatgggttacgtaacttaatatcatttacaggtgatacattagatcatttatggcgtgtaacaagtttaaatcaagccattgcattaggtatcgatgatagaaaaggtagtattaaagtaaataaggatgcagatcttgttattctagatgatgacatgaatgtaaaatctacaataaaacaaggtaaggttcacacatttagctaatagataatcataattaaatgtatgcaatagatttaatctgttaacataagcactttatattatgataaaatagaagcaataacatttttttctgggggtgtctaaatgggaaggcgataacatgtagttgtaatttaagtcatagtgataaatttgaatgcgtgttacccatgagtgacacatataacatggaggtgaatccctagaaatagggaattaattggaaacttcgaccataattagtttgattatatttattctattaattgcattaaccactgtatttgttggttcagaatttgcattagtaaaaattagagcaacaagaattgaacagctagcagatgaaggaaataaacctgctaaaatagtaaaaaagatgattgctaatctagattattatctttctgcttgtcagttaggtataacagtaacatctttagggttaggttggcttggtgaaccaacgtttgaaaagctattacacccgatatttgaagcaatcaatttaccaactgcattaacgacgacgatttcgtttgcagtatcatttataatcgttacgtatttgcatgtagtacttggtgaattagcgcctaaatctatagcgattcaacatactgaaaagcttgctttagtatatgcaagaccattgttctatttcggtaacattatgaaaccattgatttggctgatgaatggttctgcacgtgttattattagaatgtttggtgtaaatcctgatgcccaaaccgatgcaatgtcagaagaagaaatcaaaattattattaacaatagttataatggtggagaaatcaaccaaactgaattggcatatatgcaaaatatcttttcattcgatgaaagacatgcaaaagatataatggtacctagaactcaaatgattacactaaatgaaccttttaatgtagacgaattactagaaacaataaaagaacatcaatttacgcgttatccaattactgatgatggtgataaagaccacattaaaggatttattaacgtcaaagaatttttaactgaatatgcttctggaaaaacgattaaaatagcaaactatatacatgagttgccaatgatttcagagacaacacgtataagtgatgcattaattagaatgcaacgtgaacatgtacatatgagtcttattatagatgaatatggtggaacggcaggtattttaacgatggaagatattttagaagaaatcgttggggaaattcgtgatgaatttgatgatgatgaagtgaatgatatcgttaaaattgataataagacattccaagtaaatggtagagtactattggatgatttaactgaagagttcggtatagaatttgatgattctgaggatattgatacgataggtggatggttacaatctcgtaatactaacttacaaaaagatgattacgtggatacaacttatgatcgctgggttgtttcagaaatcgataaccaccaaattatttgggtgatgttaaactatgaatttaatgaagcgagacctactatcggacagtctgatgaagatgaaaaatcagaatagatattaatatataaaccaactaagaatgatttaattcatttttggttggttatttttttgactaaaattaatgaaaagtgaaaatagtattggaactcaatatctttaatgatttaatgaatattttttattgaaagcgataattcgtattaattgagtttgttgaaaaatttagggtaatgtaaagatataaaagatacatagattggagagatataaagatgttgaatgagatacaaatattaaataatggatacccgatgccttcagttgggttaggtgtttataaaatctctgacgaagatatgactaaagttgtaaatgctgcaattgacgcaggctatagagcgtttgatacagcatacttttatgataatgaggcttcactaggacgggcattaaaggataatggcgtcgatagagaagatttgtttataacaacgaagttatggaatgactatcaaggttatgagaaaacattcgaatatttcaacaaatcgattgaaaatttacaaactgattatcttgatttatttctaatacattggccttgtgaagcagatggtctatttttagaaacatataaagctatggaagaactttacgagcaaggtaaggtaaaagcaataggtgtatgtaattttaatgttcatcatctagaaaaattaatggctcaatcaagtatcaaaccaatggtgaatcaaattgaggtacatccatattttaaccaacaagaattacaagaattttgtgatcgtcacgatattaaagtgactgcatggatgcctttgatgagaaatagaggactactagacgaccctgtcattgttaaaattgctgaaaaatatcataaaacaccagcacaagttgtattgcgttggcatttagcacacaatagaattattattccaaaatctcagacacctaaacgcattcaagaaaatatagatattttagattttaatttagaattaacagaagtagctgaaattgatgctttaaatagaaatgcaagacaaggtaaaaatccagatgatgtgaaaattggggatttaaaataactggatgttaaattttacgtttatgaatgccttttaatgtgtacattaaaataaatgagttggtttttactatttgataaaacaatactcaggtacattcaaaatcttttaaataaaaaggatggacatagatgaaaattagagtcgtcattccttgttttaatgaaggggaagtcattacacaaacacatcaacaattaactgaaatactttcacaagatagtagtgtgaaaggctatgattataatatgcttttcatagatgatggtagtacggataccactatagatgaaatgcaacatcttgccacaatagatagacatgtcagctttatttcttttagtagaaattttggaaaagaagcagctatgattgcaggttaccagcatagtactgaatttgatgcagtcatcatgatagattgtgatctgcaacatccacctgaatatattccgaaaatgattgaaggttttatggaaggctatgatcaagtgattgcaaagcgtgatagaagtggtgaaaattttagtcgcaaaacattaagccatttgtattataagttagttaattgctttgtagaagaagtacaatttgatgatggtgttggtgattttagacttttaagccaaagagctgttaaatccattgcatcacttgaagaatataatcgattttcaaaagggttatttgaatggataggatataatactaaagtgtttacgtatcaaaatgttgcgagacaaaaaggagaatctaagtggtcctttaaaaagttatttaattatggtattgatggattgatttcctttaatagtaaacctttgagaatgatgatttatcttggcttgtttatcttttcaataagcgtgctatatattatctatttattcattaatattatgatttctggtgttaatatcccaggatatttttcaacgattgcagctattttattattaggcggcatacagttaatttcaattggtgttgtaggtgaatatattggcaggatatattatgaagttaaggcacgtcctaaatatattattcaagctacaaatctttcaagtattgaaaatgatgagaaggatacccataaaatttattctaaataaacaataaaagaagccctcattaatgagagcttctttttagtctttgcattttattttataaataaatcggattatgacgtaatgtctaatttgtgtaatgtcacagtcatcgtagttcctacatctatatcactgcttacactgatttttgcgttattttgttgcgcgagttcattagctatatataagcctaatccagaaccacccgtttttgtattacgagagttttctactctgaatgttcgttcgaatatacgttcttgtagttctggtataatgccaataccttcatcgctaatagcaatgtcgatagtatcttgatctttattttcactaatattaatatcaatgcgactaccaacatttgaaaattttagcgcattatcaagtaagtttgttaaaatacgctcaagtggcgttcgatattgataaaatgcatcaatttcgctacagaaattcacttctaatgtgcggttttcatgtttgatacgttgctcatatggttgcaatattgatacaagtaattggtctagttgtattaattctgggggatatgttttacctgtatttaaagtgataatatgagtcatatcatcaaataatgttgataatctgtttgcttgtttaattaatatgtcgtatgactctttaatctcatgatcctttgtgattataccatcacgtagtccttcagaatatgaaataatgcttgctaaaggtgtttttaaatcatgggctaagttttgaatcagttctgttttttcttgttgttcggatttaatttgattcatttgttgcgtaatttcagaagccattttattaaaagattgatttaattcataaatttcttttggtgaattaaacgttttatcattgcttgcgtaatttccgttagcaaattgcttagtttttatattaaactgcttaattttttgtataagtggattaataaaaatactacatattaataaggttaaacagcttgtaattattgtcgttaaggtcaaagttagtgtcatatggccgttaaaccacattaaaatatatgcaattgctaaaatagttgaagttaatagtatactcgatacgacgccaataatgatttgacttctaattgataacaccattatcggctcctttcaaatttatatcctaatccccatacagttgtgatggtatatgttgtaaagctctctttttctaatttttctctaatacggtgtatatggacattcacggtattagcatcttcgtaatagtcatatccccaaactttttcaagtaattctgatttagaaataacttcattttctctagaagctaaataccacaataactcaaattccttaatacgcatagggacttcgtgaccatttacagtcacaactttacttaagttaataagtgttaattcatcaaacgacagttgttcaactggttgatgatggtatttcttcattcttgtaagtaaattattaatacgtaaaacgagttcccttggactaaatggttttttgacatagtcatctgcacctaaagttaaggcgtaaatggtatcatgttcttgtgttttggcagttaaatagataaaggggatatctaatttttgccttttcatttctttgacaatgtcgtaaccattaacttctggcatcatgatatcaagtaccatgatatcaatatcatttgatagtaaagaaattgcttctttaccgctagttgtcgttgttactttgtaaccttcatattcaaaataggtttgacaaatgtctacaatgtcttgttcatcatccacgatcagtaagtgggtcatctattttttcacctctgttcttacgacctctaaagtaattaatgatttctttaagtgaaatctgttttaacaatgagtgactcattagtaaaaggataaagaaagttaattgaagaggatacgtaaatatcatatctgctaagatataatttatcataacaaaggctccaaagaaactagcagcatatgcaaaaactccaaaaattaaacctaatccaattgcaatctctccgagtgggacaacaatatcaaataatgacgtcgtatgtgcaactatatttgcgaaaaaccacttataccactctggtgaatcagtattgttagcgatgactggtactaaacctttcagcgtaaatccgcccgttaatttttcgtaaccttgcattaacataacaatacctgaacccacacgaatgataaatgtaacgagtagcaataatttattcatgatgttcacattctttctatttattgtgtgtaatttatataaacataagattaagcaacataatgtgatttgcagtgttatgtgaacaggaagtgtttgagctcatgggttgcttaagctaaacaaacctcaagctctaaaaaaatttacttatgtgctctacaatcttatgggatttaatagttgtatatatattgaaaaaaggaaagtatgatttctacaaactaggggggctgtgaaatcatacgctttccattgagtaatgagtgtaatgtatatttttaaaatttgtaatgtatagtaatagtatgttgtaaataaaagtttaactcagaaattgattattttaatttagcgccgccgaagatgacgtgagcttttttacaatagattgttacttcatcatatttgcttaaatctacatttttaagatcaaatgtttgtttttctttatcgtagtcaaccattgcgatttctttaccgtttttaatgtcgccattttttgttagatagacgtataaatctggaccttttgatgatttgtagttagtaagcattaatttaccatttttaatctcagctttaccttcaacagtttcaccgtttttagaactgaatgtaccagttaggtgttttgttttatcagttttaacattgctatcttctgactttgttttttgttcagttttgttaccttgatcttgtgaattagaattaccacaagcacctaaagctaatgttgtgataacagcaccagctgctaaaaaatattttgtattcatgctaactcctcatttcttcaatttgataagttaagtttaaaatgaaggcaaataatatgccattaactaattcttaacttcgtttaaatatcgcttaactaatattgaagaaagaataatttgaaaatgaaaataattgtctgatttaaataaataggagtcaaaataagaggagggcggttttttaagtgagaaaatatttatctaaactagttatcactataaaacacttctgatatattgaactaagaatatcagaagtgttttatagttttggtattaaaatttataaaccttttgccacaataaaaacaacaagaaaataagatagacgattaaatacaagtaccaatatggtgttaaaaccatcataacgataaatgaaatgttaataatgataagtcctttaatcattagtttctttattttgttattattttcagcagtttcatctaagttattaaatgttgaaataaacaacataataccaccaatgatgaaaatggcaggggctaaaaatggaatagacatatatattgattgtgtacttgaaaagtcggtaacacgttgcgttaaactgacaacaatcgttaatatgatagcaataaatttttggtctgtaatgtatacaggttttaattttttatcaatgtaaaactgtagtatcgtccaaatgataaacatcgttatagtacacagagtaataaagttatatttatcaattatgaatgtatttataaaggcgtttatagtaatagataacaacattgcacttaatgataaatgttgcatttgatgcctatataaattgaatccagttataagtacgacgatagcaatattaattaatatatatacaatcatgatggactcctgttcgttatacttcaatcaactattatatcaattaatatattgttattcattagatatgacttgtaaaaagtaaaataagttatcctttatacaccttttttattactccaaagtaatgtatgaagttgtggtaacacataaacgtgattcatatcattactttgcataactaaatctaccaactgctcataccgttctaacaacttttcggtatgattatctacgctgtctgataaatatgggttaccaacttgtaaatagaacggaatatctggataacggtggtgtatcattttggcaaaatcataatctttatcgtcgaatacaactacttttaagtttaatgaggaaggtacgcattgtgcaatcacttcatctaacttttttaaatcaggtgtcatagttgaacttggtggttttggactaatcgttaaatcatcaatttgtgtcatccaaggttggaatttactgccttgtgtctccagtgcgctgaaaatacctttatcttgaaataagtcaactaactcttggatacctttaattaatgctgggttaccaccagaaattgtaacgtggttaaataaatcgccaccaattcgttttaattcatcataaatttcttcagcggtcatgagttttatatcgcttttagcactaccatcccaagtaaatgcagaatcacaccagctacagcgataatcacatccagctgttctcacaaacatcgtttttctaccgattactcgaccttcaccctgaatggttggaccgaatatttcgagtacaggaattttagccattagttacacctgttcctttggtctaaatacgacataacttgttggtgtttctcttacaaatacttgaatacattttggttggtgttcgagcgatgccaaattttctttaacaatttgataaattgtttccgctacgatttcagttgaagggattttgtttttaaaagcaggtaagttatttaacagttgatggtcaaatttaccgtgtatcatctttttcaaatggctaaagttcactaaaaagccagtgtcatctagtttatcaccgacaattgttaaattaacaaagtaagtatgaccatggacattttgacaaatacctgcttcttcacacggaatgtgatgtgcagctgaaaaattaaaatctttatttaattcgaattgatatggatgcgttgtactaggatagatttgttgtaacattttaaagcgctcctttactttcaagatattgatttagtccacgttgacgtaaatgacaagctggacattcaccacagccatccccaatgataccgttatagcatgttaatgtttttgtacgaatataatctaaaacttcgagttcatcacttaatttccacgtttctgctttgtttaaccacattaaaggagtatgaataacaaaatctttgtccatagctaggcttaatgttacgttcattgattttataaaactatcgcgacagtctgggtagcctgaaaagtctgtttcacatacgcctgtaataatatgcttagccccaatttgataagctagagcgcctgcaaacgacaagaaaagtaaatttctagctggaacaaatgtattaggtataccatcttcattattagtaatttccatatcatgttgtgttaatgcgtttggagtaagttgtgataataatgacatatctaaaacgtgatgtttcattccttgatcttgtgcaatttgttttgcgacttcaatttcagtatcatgtctttggccataattaaacgttacgagttcaacttctttgaaatgtttttttgcataaaagagacatgttgtactgtcttgaccaccactaaagacaacgatggctttttcattatttaatgcactttccattttgtaattgctcctatcattaataatattaataaagaggttaatggcattgataagcccgtttttaatttataaaataaaaaaagcctatctccataaaagatagacgaaagaaatgggttgctcctataatatatattaaaggtttaccaacgaatgtttgaaatttcaatgtctagttttttatagagggtttcagctaggaacctctgatattcatttatgtacgatgaatagaatataccatatattagttaaaatcaaggtcaggataatgacaatgcttttaaagttttagctacatccaatacatattataaaaataaaacacatttagaacggagtatacaatgattctagtcatagataataatgattcatttacatataatttaatagactatattaagactcaaacgaaactaacagttcaagttgttggtattgataatctgctgatagaagacgtcattaatatgaagccaaatgcaattgttatttcacctgggccgggtaatccggatgattatcctatcttgaatgaagtgttagaacaattttatcagcgtgtacctatcctaggtgtatgtttaggatttcaatgtatcgtgtcttattttggtggaaatatcattcacggctatcatcctgtacacggacatactacacagttacgccataccaatgaaggtatttttcaaggactgcctcaaaatttcaatgtaatgcgttatcattcattaattgctgacggagcgacttttccaaattgcttaaagattacagcaaaaaacgatgaagcgattattatggcatttgagcatattacatttccggtttttggtgtgcaatatcatcctgaatctattttgagtgaatacggttatcgacaagttgaattatttttatcgaaggtaggtgattactgtgagaatagaatataattatcgctactatttaactgaaaatgaatataagcaataccatattcaattaaagggatttataaagaagtatgttgccactaagttggctgatgtgggagaagtgatacactttgcacaagcgcagcaacgacaaggtagatatgtttcgttatatttaagttacgaagctgcaaagtattttaatcatgttatgtatacacattcattagctaaagatgatatttatgcagtagcttatagttttgaaaaagcggaaagcataaattcaacatatgaacatcaaactttttatgtatcaaagcatcatttttcatttgttgaatcttctgaggttatgatgactaatattaaacgtgtccaacaagcaattgttgaaggcgaaacgtatcaagtgaactatacggcgcgcttaacggataacatttattatcctattagtactttatatgaacgattaactcaatttagtaatggtaattatactgcgttattacaaacagatgaaatccaagtagcgtctatctcaccagaattattttttcaaaaaggacagtttaacaatgtcgataacgttatcataagcaaaccgatgaaagggacaatgcctagaggtaaaacggaggctgaagatcaacagtattataaaacattgcaaacttcttcgaaagatcgtgcagaaaatgtcatgattgttgatttactaagaaacgatatagggagaatatcacagagtggctcaattaaggtgtataaactatttttcattgagacatataaaactgtatttcaaatgacttcgatggtaagtggaactttaaaaactaatacagacttaattcaaattttaacatcgttatttccttgtggttcgattacaggtgcaccgaaactgaatacaatgaaatatattaaacaattagaaagttcacctcgtggtatatactgcggagcaattggactattacttccaactgaagatgataaaatgatttttaatattccgattcgtactattgagtataaatatggacaagcgatttatggagtcggagcaggtattacaattgattctaagccaaaagatgaagtaaatgaattttacgcaaaaaccaagattttggagatgttataatgcaattatttgaaacaatgaaaattgataatggacatatccctagacttacttatcatactaatcgcataaaatgttcttccgagcgattaaattttaaatttgatgaacatgcatggcgaaatgaattaaatgatgtaacaacaaagtatcacagtggccaatatagacttaaaatcgtattaaatgctgaaagcgaatttgaaacgatagtgtcacctttacctgagaaaagtagttttacagcaaaatttcaagtgttgcccaaaacagttaatcccacttttataaataataaaacgacagaacgaaagcatttagcacacaatcatgaaacagatttaatattgctaacttcagaggacggcaaggtccttgaatttgatattggcaacattgtcattgaagaggatggaaaatggtacacaccaagttataaagatgatttcttaaaaggatgcatgcgtgattatttaatagatagtgacaaacttgttgaaaaagactttaataaaaacgaattgatttataaatatcataacaatgagatacgtttatttttgataaatagtttacgagaggttgccgatgtccacctttgcctttaaaattagtatgataataatgtagaaaatgaagtgaaaacaaatttaaaaattaaatggggccaaatatgattattgtttatattgtgctgttgttaattcttgtatacgtaaattatcgattagtgaatcgattgctatctgaaaatagaatatatgttgttcgtttgatagcaacaattactactgttataagctttatccttgtatacgctttaattcacgaactcatgccttttgttgtgcgagcaatggatttaatgtatcaccagtaaatttagtgagtaggtaaaatgaacgtaaatgaactattcaatcgattctataattaaaaatcaaagtaaagtaaccaaatattgaagaggtgtacaaatgaaaatatatagtcaaggtgaccaagccattgtagtcgcaattgaaaaagaagtatctaaaagtttaaccgaagatttattaacacttcgctcatatttaattgaacaaaattatccatttattatagaaattgtgccatcagaatcagacatgatgattgtctatgacgcaagggatatgattaaacaccataatatacaatcaccttttttatacatgaaagcactaattgaatcgattcatttaaacataaaacatgattttaaccagcaagatttgattgaaataccaattgtgtatggttcgaaatatggtccggatttagaatcacttttaaaacattacaaaatcaagctagaaacatttattgaattacactctaaggcgcaatattttgtttcgatgatgggatattcacctgggtttccttatttaactggattaaataagaaattgtatattaatcacacgagtaaacagaaaaaattcattccagctggttctgtagtacttgaagggaaaaaatgcggtattgtaacaacggatacaattaatgattggttagttattggttatacaccattatcactttttaatccgaaagaatcagatttcgcacgcttaaagttaggcgataatattaaatttagacctatcaatgaaaatgaattagaagtaggagcgtttaaagatgtcaatcataattgaaaaaagtggcttattcagtagctttcaggactttggtagaaggggatatgaacatgatggtgtaattccatgtggtgcacttgatactttagcacatgaaattgctaatcgattagttgcaaatgacaagaatgaagcaactttggaaatgactaataaaatggcaacgattcgttttacagaacctacgctgattgcattagcagggggtaatgtcaaagcttacactgagcatatgactatatctccatataaattgtatttgttagataaaggcgatgttttaaagtttagagaaacaagttatacatcgcgagtgtatttagctgtgggaggcggatttgaattagatgcatggttaggatctaattcaaccgactttaatgtaaaaattggtggttttaaaggtagaacattacaagatggcgatgaaataaagcttaagagagattatacagctcgtcatcataagttatttgaaaaccttgctcacacgaaacaaacagattggggtattgatggatacgccttgtcatttaattatatgtctgatgtatttcatgtcgttaaaaataaaggtacggaagattttaaagaagatgccattcaaagatttgtgaaacatgattataaagtaacgagtaaagcaaatcgcatggggatgatgcttgaaggtgaaaaaatcaaagctttttatgaagatatgccaccgtatcagactgtcaaaaaaggaacgatacaaattaagcgtgatggcacacctattatcttattaaatgatcattatacgctaggtagctacccgcaaatcggtacaatcgcaagttatcatttaacgaaattagcacaaaaaccacaaggatcacgtttgaaatttcaatttatagatattttaacggctgaaaagaaccttgttaagtatagtaactggttaaaccaattattccatggaatagaatatagaatgcaattagaaatgatgaaataatatttggtacgtagctcatactagagtccgatgcaaataatttcctcctaatgtataatgaaataatactgtgttttatctgcgaaatgtatcatattctaattcgtttcacagtaaaatgaaaagataaagtgtgtttttacttgaattttgactaaaattactctatatttattaattgagctatgcttattattacaatttgattacaaattttaaatttgttaattgaatgataatattaaataaagaaacttacacaagcaaatatgagttgtagcccaaaatacttgttaaatcaaagttgaaagctacaaataatgaaaattataaacttgaatctgaaagtaattactataattatgacaatgttaacttttaaacgcacttattaattaactacataatgttaatatctaatttattcaagtactttcgcaagatttattatctaaataacgggggaaagaatcatgagttcacaaaaaaagaaaattagtctttttgcgttcttcttattaaccgtaataacgattaccttgaagacgtatttttcttattatgttgatttttctttaggtgttaaaggtttagtacaaaacttaatattattgatgaatccttatagtttagtagcactggttttaagtgtgttcctattctttaaaggcaaaaaagcattttggttcatgttcataggcggcttcttattgacgttcctattatatgccaatgttgtgtactttagattcttctcggattttttaacgtttagtactttaaaccaagtaggtaacgtagaatctatgggtggtgcggttagtgcatcattcaaatggtatgactttgtttatttcattgatacgttagtttacttattcattttaatatttaaaacaaaatggttagacacaaaagcatttagtaagaaatttgttcctgtcgtaatggcggcttcagtagcattattcttcttaaacttagcttttgctgaaactgacagaccagaattattaacacgtacatttgaccataaatatttagtgaaatatttaggaccgtataactttacagtatacgatggtgttaaaactatcgaaaataatcaacaaaaagcgttagcatctgaagatgacttaacaaaagcattaaattacacgaaacaacgtcaaacagagcctaacccagaatattatggggtggcaaagaagaaaaatattattaagattcatttagaaagtttccaaaccttcttaattaataaaaaggttaatggtaaagaagtaacaccgtttttaaacaaattatcaagtgggaaagagcaattcacatacttccctaactttttccatcaaacaggtcaaggtaaaacatctgactctgaatttacaatggataacagtttatacggtttaccgcaaggttctgccttttcattaaaaggagataatacgtatcagtcattaccagcaattttagatcaaaagcaaggctacaaatctgatgtcatgcacggtgactataaaacattctggaacagagaccaagtatataaacactttggtatcgataaattctatgatgcaacatactatgacatgtcagataaaaacgttgtaaacttaggcttgaaagacaaaattttctttaaagattctgctaattatcaagctaagatgaaatcaccattctattctcatttaattacattgactaaccactatccattcacattagatgaaaaggatgcaactattgagaagtcaaacacaggtgatgcaacagttgatggttatattcaaacagcgcgttatttagacgaagcattagaagaatatattaatgacttgaagaaaaaaggattatatgacaattcagtgattatgatttatggtgaccactatggtatctctgaaaaccataacaatgccatggaaaaactattaggtgaaaaaatcacaccagctaaatttacagatttaaacagaactggtttctggattaaaatccctggtaaatctggtggtatcaataatgaatatgctggtcaagtcgatgtaatgccaacaattttacatttggctggtatagatacgaagaactatttaatgttcggtactgatttattctctaaaggtcataatcaagtagttccattcagaaatggtgactttataacaaaagattataaatatgttaatggtaagatttattctaataaaaataatgaactcataactactcaaccagctgatttcgaaaagaataaaaagcaagttgaaaaggatctcgaaatgagtgacaacgtgcttaatggtgatttgtttagattctacaaaaatccagacttcaaaaaggtaaatccttcgaagtataaatatgaaacaggacctaaagcaaactctaaaaaataatatctaaacaccaactcggattgataaaatatcaatccgggtttttattatgttctacattatatgtgttgataaaaaggtatattataaagatcattagcatagtcatcaaagccttatcaagttttatttatagttgaagcaacaatatattaaattatgacacttaacggtatcgatttcttttgatttcaaaaaggtgtataatgtatagaactgatttaagtacgtagagatttcaacagaagaaggaagatgggtatggaagcatataaaattgaacatttaaataaatcttatgccgataagactatattcgataacctagatttatcaatttcagaaggtgaaaaaataggtttggtaggcataaatggtacagggaaaagtacgttgttaaaagtaattggtggtattgatgatgattttacagccaatgttatgcatccaaatcaatatcgaattcgatattcgtctcagaaacaggacctgaatgaagatatgacagtttttgatgcagtattaagttctgatacaacaactttacgcatcatcaagcaatatgagcaggcagtacaagcttatgcggatgaccaaagtgataaattgttcaagcgaatgatggatgcgcaagaagctatggatcaacatgatgcttgggactataacgctgaaattaaaacaatcctctcaaaactaggtatacatgatactactaaatacattaaagaattatccggcggacaacaaaaacgtgttgtacttgctaaaacattaatagaacaaccagatttattgttattagatgaacctacgaaccatttagacttcgaatcaatcagctggttgatcaattatgtgaagcaatatcctcatacagttttattcgtaacccatgatcgatattttttaaatgaagtttccactagaattattgaactaaacagaggtaagctagcgtcatatcctggtaactatgaatcttatattgaaatgcgcgctgaaagagaagtaacacttcaaaagcaacaacaaaagcaacgagctttatataaggaagaacttgcttggatgagggctggagctaaggctcgtactacaaagcaacaagctagaattaatcgatttaatgacctagaaaatgaagttaaccagcaatataaagacgataaaggtgaattgaatcttgcttattcaagattaggtaagcaagtgttcgaattagaagacttatcaaaggctattaatgataaagtattatttgaacatctgacggaaattattcaaaaaggtgagcgtattggtgttgttgggccaaatggagctggtaaaacaacactcttaaatgttttaagtggagaagaccaacaattcgaaggtgaattgaagactgggcagacggttaaagtagcttattttaagcaaacagatgagaccctggatagagatattcgtatgattgattatttaagagaagaaagtgagatcgcaaaagaaaaagatggaacatcagtatctattacacaacttcttgaacgatttttatttccaagtgcaactcatggtaaaaaagtttataaattatctggtggagagcaaaagcgtttgtatttattacgtctactcgtacaccagccaaatgttctgttgttagatgaaccgacaaatgatttagatactgagactttaacaatacttgaagattatattcatactttcggtggtacagtgattaccgtaagtcatgatcgttacttcttaaataaagttgcacagtcatattggtttattcatgatggtcagatggaaaagattataggaacttttgaagattatgaaagttataaaaaatcattagataaaaataaatccccattgaagcaacaatctaaatcttctacaactgtacgtaagaaaaatgggttatcatataaagaaaaattagaatatgaacaattgatgaaacgcatagaacaagcggaagtaagaatggaagaaattgatgtgctcatgattgaggcaagtgcagattatgggaaaattaaagaattaaacgaagaaaaagaacaacttgaaattcaatatgatttagacatcacaagatggagtgagttagaagaaattaaagaacaacaataaggggtcaatttatgatgcaacaaacattatcgcattactttgggtatgaaacgtttcgaccaggacaagaagaaattattagcaaagtattagaccatcgtaatgtgcttggtgtcttaccaactggtggaggtaagtctatatgctatcaagtaccaggtttattgttaggtggtacaacaattgtaataagtccacttatatcattaatgaaagatcaagtggatcagttaaaagcgatgggaattcaggctgcttttttaaatagtagtttgactcaaaaagagcaacaacgtattgaaaaagcattatcaaatggagaaattcaatttttgtatgttgcaccagaacgatttgaaaaccgatattttttaaacatgcttcagcgtataaagattcacttagtcgcgtttgatgaagcgcattgtatatctaaatggggacatgatttcagaccgagttatcaaaacgtaatttctaaagtatttacgttacctcaagattttacaataatagcgttgacagcaactgccacggttgaagtacagcaagatattagagaaaagttaaatatcgctcaaactgatcaaattaaaacgagtactaaacgtagaaacttaatttttaaagtaaatcctacttaccaacgtcaaaaatttgtattagattatattaaaacacacgatgaagatgcaggtattatttattgttctacacgtaagcaagttgaagagcttcaagaagccttagaaagccagaaaattgaaagtgttatatatcatgcaggtttgagcaataaagaaagagaagaagcgcaaaatgacttcttatttgatcgtgttaaagtagtcgttgctacaaatgcttttggtatgggtattgataaatccaatgtacgttttgttattcattataatatgcctggagatttagaatcttattatcaagaagcgggtcgtgcaggtcgtgatgggttgaaaagtgaatgtattttgttatttagtgaacgcgatatcaatttacacgagtattttataacagtctctcaagctgatgatgactataaagataaaatgggcgaaaagttaactaaaatgattcaatatacaaaaacaaaaaaatgtttagaagcaacaattgtccattattttgaaccgaatgaaaaattagaagaatgtgaacaatgtagtaattgtgttcaacaagataaatcatataatatgacacaagaagctaagatgattattagttgcatcgctcgtatgaaacaacaagagagttatagtgttatcattcaagtgctaagaggagagtcaacagattatattaagtataaaggttatgatcaaatttcaacccatggtttaatgaaaggttacacaacatcagaattaagtcacttaatagatgaattaagattcaaagggttcttaaatgaaaatgatgaaatattaatgtgtgattcttcaattaaaaaattactcagtaatgaagtagaagtattcacaacaccatttaagcaaaaagcgactgaaaaagtatttataaatacggttgaaggggttgaccgagtattattcagtcagttggtagaagttcgtaaaaagttaagtgacaaattaacgatagcacctgtaagtatattttctgattatacgttggaggaatttgctaaacgtaagcctgcttcgaaacaagatatgattaatattgatggcgtaggtagttacaaattaaaacattattgtccagcatttttagaaacgattcaaaattataaagccaaagtatagtgaaggcacctagtaagcattccttgttttactgggtgtttttttgaatttaaggtaaaatatcactatttcttaactggagattacctattattcattattttgttaaaaaagttcaaggataaatcatttaaatttgaaaattgtaataaacgtggttaaatagggaatacatacatataatctcggttttatgctatgagaaaaaaagaggtggcaaagtgattaagtttaaaaatgtaactaagcgttatggcaaacatgtcgctgtcgataacattagtttcaatattaatgagggtgaattttttgtactaattggaccttcaggttgtggaaaaactacgacattaaaaatgattaatcgactcattcacttaagtgaaggttatatttattttaaagataaaccaataagtgattatccagtatacgaaatgcgttgggatattggatacgtattgcagcagattgcattattcccacatatgacaattaaagaaaatattgcacaagtgccacaaatgaaaaagtggaaagaaaaagatatagataaaagagtagatgaattacttgaaatggttggattagaacctgaaaaatataaaaacagaaaacctgatgaattgtcagggggacaacgacaacgtgtaggagttatacgtgcgttagcagctgatccaccagttattttaatggatgaaccgtttagtgcattagacccaatcagccgagaaaaacttcaagatgatttaattgaattacaaactaaaattaagaagacaatcatatttgttacacatgatattcaagaggcgatgaaacttggtgataagatttgtcttttgaatgaaggtcatattgaacaaattgacacaccagaaggatttaaaaataatcctcaaagtgaatttgttaaacaatttatgggtagtcatttagaagatgatgcgccatgtgttgaagagaacgcaattatccgtgacttggaaattatgaaaccaatcgatgaggttacatctatgagcgcttatccaattgtttatgacaatcaacaaattgaagtattgtatcaacatttatcagagagcgagcgtgtcattgtcatgcaagaagatagcgtaggtcaatatgttattgataggaaagatatcttcaaatatttgtcccagaaaaaggaggtagctcaacatgactaactttttcgacatattgagtgaacgtaaggggcaactattttcgacaatgatagaacatattcaaatatcatttatcgcattattgattgcaactgctattgcggtaccattaggtattttattgacgaagactaaaacgatatctgaaatcgtaatgaatattgcggcaattcttcaaaccataccatcgttggcattattaggtttaatgattcctttatttggtatcggtcgtgtgccagcaattattgctcttgtagtgtatgcgttgttaccaattttaaggaatacgtatactggaattaaagaagttgatccatcactcattgaagcggctaaaggtataggtatgaagccatttaggcgtttaactaaagttgaacttccaatagcaatgcctgttataatggctggtgtaagaacggctatggtattaattataggtacagcaacactagcagcattaattggtgcaggcggactaggagatttaattttattaggtatagaccgtaacaatgcatcattgatattattaggtgcaattccagcagccttattggcaattatatttgatttaattttaagattaatggctaaattatcttataaaaagttattgatgacgttaggtgttatagtgatgattattatactggccattgctattcctatgtttgcacaaaaaggtgataaaattacgttagctggaaagcttggctccgagccttcgattattacaaatatgtataaaattttaatagaagaagagaccaaaaatactgtagaagtgaaagatggtatgggcaaaacagcatttttatttaatgctttaaaatctgacgatatagatgggtatttagagtttactggaacagttttaggtgaattaacaaaagaaccattgaagtcaaaagaagagaaaaaagtatatgaacaagctaagcaaagtcttgaaaagaaatatcaaatgacaatgttaaaaccaatgaagtataacaatacgtatgctttagctgtaaaacgtgattttgctaaacaacataatatacgtacaattggtgatttaaataaagttaaagatcaacttaaaccaggatttacattggaatttaatgatcgtccagatggttacaaagctgttcaaaaggcttataatttaaatttagataacatacgtacaatggaacctaagttgagatatcaagcgatcaataaaggtaatattaatttaatagatgcatattcaactgacgctgaattaaaacaatatgatatggttgtgttaaaagatgataagcacgtatttccaccatatcaaggagcaccattatttaaagaaagctttttaaagaaacatccagaaattaagaaaccgttaaacaaactagaaaacaaaatatctgatgaagatatgcaaatgatgaactataaagtaacagttaaaaatgaagccccatatacagttgcgaaagattatttaaaagcaaaagggttaatcaaataacggccaacgccacataagatgcgtaacaccaaattatatcttatgtggcgttgttatatttaaatctataattatgttcaattcaaacatgcaataatgattaaaaatatgacatgttaaacacaatgtaagttattatgatgtgaaaatagtagcattgcattttagaaacatagagcgatataatgaatataagttttttaaaatttcagttaattctaaggaggttgtttttattatgaaagaacaacttaatcaactatcagcatatcagcctggtttatctccaagggcattgaaagaaaagtatggcattgaaggagatttatataaacttgcatcaaatgaaaatttgtatggaccatcgcctaaagttaaagaagcgatatcagcacacttagatgagttatattattatcctgaaacaggatcaccgacattaaaagcggcgattagtaaacatttaaatgtagatcaatcacgcattttatttggtgcgggattagatgaagttatattaatgatttctagagcagtattaacgccaggggatactattgttacaagtgaagcgacattcggtcaatattatcacaatgcgattgttgaatcagctaatgtgatacaagtacctttaaaagatggtggcttcgatttagaaggtattttaaaagaagttaatgaagatacgtcattggtatggttatgtaatccaaataatcctacaggtacatattttaatcatgagagcttagattcgtttttatctcaagtacctccacatgtaccagtaattatagatgaagcttattttgaatttgtgacagcagaggactacccggatacacttgctttgcaacaaaaatatgacaatgcattcttattacgtacattttcaaaggcgtatggattagcgggtttacgtgtaggatatgtggtagcaagcgaacatgcaattgaaaaatggaacatcattagaccaccatttaatgtgacacgtatatctgaatacgcagcagttgcagcacttgaagatcaacaatatttaaaagaggtaactcataaaaatagtgttgaacgtgaaagattttatcaattacctcaaagtgagcatttcttaccaagtcaaacgaattttatatttgtaaaaacaaagcgggtaaatgaactttatgaagcacttttaaatgtagggtgtattacgcgaccatttccaaccggtgttagaattacaattggttttaaagaacaaaatgataaaatgttagaagttttatcaaactttaaatacgagtagtaagtggggagtgggacagaaatgatattttctcaaaatttatttcgtcgtcccaccccggcaaggttgactagaattgaaaaaagcttgttacaagcgcattttcgttcagtcaactactgccaatataactttgtagagcattgaacattgatttatgtctcaagctcaatgcagtgtgaattaagaggcgagagtattcagtggtaaaatgtgacaatagatgatattgttttgtatcaattgcttttttgctatactgaatcaatactgatattttgaggagaagattaaaatgacccgtaaatcaatcgcgattgatatggatgaagtattggcagatacattaggagaaatcattgatgctgtcaattttagagcggatttaggtattaaaatggaagctttgaatggtcaaaaacttaaacatgttattcccgaacatgatggattaattacagaagtattgagagaaccaggcttcttcagacatcttaaagtgatgccgcatgcacaagaagttgtgaaaaaattaactgaacattatgatgtatatattgctacagcagcaatggatgtaccaacatcatttagtgataaatatgaatggttactagagttctttccatttttagatcctcagcattttgttttttgtggtagaaaaaacatcgttaaagctgattatttaatagatgacaatcctagacagcttgaaatttttactggtacaccgattatgtttacagcagtgcataatattaatgatgatcgatttgaacgcgtaaatagctggaaagatgttgaacagtattttttagataatattgagaaagaaaaataaatcacttgaagcctttcatgtagcaaataaaatgcatatactggggccccaacaaagaagctgacgaaaagtcagcttacaataatgtgcgagttggggtggggccccaacacagagaaattggaacgccaatttctacaggcaatgcgagttggggtgggccccaacataaagaaatactttttctttagaaattagtatttcttatgcatgagtgtaactcatgcaatcctatttttaagtacacattagctgtgactaatgataaagaatcgctacataatcaaccattagtcgttctttatcatttccgtctcactctcaataaatgtaagtctatctcattattataaatcggatgaatgtgttaatctatgtcagattacacgtcatccgattttttatagaatttgaaaaagacgcataaaccactatgatttaaaatacaatatcaatcattttagtggcatgcgccaaaattatatgtctgtttttgaaacagggtaatagcttaaagctaataacaacgaatataatgtacgttgaatcttatgattacactttaaacctaatataatatcccgttaagatcattccggatgcttacaaatcattgacagtaagtaactgaatggcatttggtataacctcaatatcaataggtgtttctaatgaaatttcgccatcaatatcaactttcattgctggatctgttgtaagtgaaatctttttaccaggtatatgctcaataccttgagtaatttcattccaattcatgctatcacgctttttaaaaatatcatttaaaatactgaaactttgttcattaaaaatgaaagtgttcagttcaccatcttgaggagacaaatcagtcaatggtatacgactaccaccaataaatggaccatttgctgatagtatcatggtcgtttcgccagaatatgtcttatcatcaattgataattgataattaaattgtgttggatttagcagtgttttgacagttgatccaatataactcaatttaccaaatatatcttttgaaccatcttgtacgttttcagcgttttgaacaattagacctaagccaacaaagttgagtgcatattgattatttattttaattacatcgtatgtaccaacttgtgcagaaatcatttgttcactagcttgtttatgattaggtgctatatttagcgtttttgtaaaatcattaaaagtaccgcctggtaaaatgccaatagggagttgaaggtcatgtgtcataacaccatttataagttcgttaaccgtgccatcaccgccaagaataaataatatatctacatcttttgcatagtttttagttttgatttcttggcaatatttaataatgtcaccttcgttttcactcaattgaatagaaagatgcttacaaattgaacttaatgctgttgtaacttccccaataccttgattaatattttttaatccactatgttcatggtaaaagaggacaccatgtgtatatttattttccatagtttagcctactttctaaaaattggttcattaaatatatatatacccacttttaattgttaataccaaaaatatgtttttaaatagagaaaatggtaataactgacattgatgtctatagagtgggacgagaaaatatagttatagctgtctataacgagcatattaagcttttatttatactgatatcttgaatttaattaatagaaacctataaaaacaggctgggacataaatccctaaaaaacagcagtaagataattttcaattagaaaatatcttactgctgttctctatttatacaatacttcgtattgaatggcttcgctttcctagggtgccgtctcagcctcggtcttcgactggcactgctccctcaggagtctcgccattaatactacgtattaacatgtaattttactttgaaatactttaaaaaaataagacactttcgtataatttaataaataccactaaactaaattaacgaggtgccttatgtataaaaattataacatgacccaacttacactaccaatagaaacttctgttagaattcctcaaaatgatatttcgcgatatgttaatgaaattgttgaaacgatacctgatagcgaattcgatgaattcagacatcatcgtggcgcaacatcctatcatccaaaaatgatgttaaaaatcatcttatatgcatatactcaatctgtattttctggtcgtagaatagagaaattacttcatgacagtattcgaatgatgtggttagctcaagatcaaacaccttcttataaaactattaatcgttttagagtgaatcctaatactgatgcgttaattgaatctttatttattcagttccatagtcaatgtttaaagcaaaatcttattgatgataattcaatttttattgatggtacaaaagtagaagctagtgccaatagatatacatttgtgtggaagaaaagtattcaaaatcacgaatcgaaattgaacgaaaattcaaaagcattatatcgtgaattagttgaagaaaaaataataccagagataaaagaagatggagatagcgatttaacaatagaagaaatagatttaattggtagtcatttagataaagaaatcgaagatttaaatcattctattgagaacgaagattgtactcaaattagaaaacagacccgtaaaaaaagaactgagattaagaagttcaaaaagaaatttgatgattattccgaaagaaaaagtaaatatgaagaacaaaaatcgattcttaaagatagaaatagcttttctaaaactgatcatgatgcaacttttatgagaatgaaggaagaccatatgaaaaatggccaacttaagccaggatacaatttacaaatagcgacaaattctcaatttgttttatcctatgacctatttcaaaacccgacagatactagaactttaattccatttttaacaatgattcaaaataccttcggttatttacctgagtatattgtagctgatgcaggttatggtagtgagcaaaactatatggctattatagatgattttaataaaacgccacttattacgtatggcatgtttattaaagataaaactagaaagtttaaaagtgacatttttaacactcaaaattggaaatatgacgaacttaatgatgaatttatatgtcctaataacaaaagaataggttttaaaagatatgcataccgtaatgatagatatggttttaaacgtgacttcaagctatatgaatgcgatgactgttcagcatgttctttgaggcaacaatgcatgaagccaaattcgaaatccaataagaaaatcatgaagaattataattgggaatactttaaagcccaaattaatcaaaagctttctgaaccagaaacgaaaaaaatctatagtcaaagaaaaattgatgtagagcctgtttttggatttatgaaggctattttgggtttcactcgaatgtcagttcgaggaataaataaagttaaacgagagctaggttttgtattaatggcacttaatataaggaaaatagcagctcgacgagctgtatattatcaaatacatttaaaaaaagctgatttctatcaaataattaatagaaaacagcttttttacattgcctaagaactttatgtcccagcctgttttaaattaggccaacaatattaacgtatacctttcatcgctttgatgattaaaggtgagaatgctaatacaattgttgtaacaataattgcaacaacacctaggaaaataaagtaatttgtttgacctagtggttctattaacttaactaaagtaccattgattgcttgtgcagaagcgttagttaagtaccaaatactcatcatttgggcattaaatgctttaggtgctaacttaacagcagcactattacccgttggtgataagcaaagctcaccgataacacaaataatgtacgatagaataacccagttaactgagaagtttgatgaacctgatgcataacctacaataccaattagtatgtatgacgcacctgctaagaacgtaccaattgcaaattttactggcaggctaggttgtttagttccaagcttttgccataaaagtgaaataattggagctaataataaaataaataatgggttaattgattggaagatcgcttcaccaaagtttgttttccaaccaaataggtttaatttcatatctgaatgttcaattccataaatgtttaatacattagacccttgttcttgaatagcccagaacaccattccaagaataaataatggaataaatgctttaacacgagaacgttcagtatcagtgacatctttgcttctaataattaaagtgaagtaaatgattggtaatgcaatacctaatactaaaacagtattactaactaagttaaatgataatgagttagttaatgcaccaataacgataattaatacaattgctaagacaacacttccgataataagaccatactttttcttttcagctggtgtcaatgggttagtaggtttcataccaacgctacctaagtttttgcggttgaaaagtacataccatactaaacctaatgccataccaactgctgcaatcaagaatccgccgtggaagtttttaacattaacaaagtgttgcaaaataataggtgataataatgcacccatattaactgacatatagaaaataacaaaacctgcatccatacgtctatcattttcaggatataaacggccaacgatatttgaaatgtttggcttcattaaacctgaaccaataatgatgaagaacattgatgtgaataagccgattaatgcaaatggtaagcttaaacaaatatgtccgataataataaatacggcacctaataaagtagcgcctctagtgcccgtaattctgtcagcaatccatccgcctggtattgatgtcatatagattaatgaaccataaactgacataattgacatagctgttgttttatcaattccaaggccattatctgttacggcaaagtacatgtagaaaatgagtagggcacgcatgccataataactaaacctttcccagaactctacaaagaagagtacgcctagtcctcgaggatgcccgaaaaatcctgtttgaggtatgtcttgaatttgatttccatgggagttttgttgtgtcatgtatacatcccatcctttcttcccctaatacaatagtttaagtaaatttgattgtgccttatcaactaaatattccaacaaatcacaaaaaaataaaaatattgagaatattctgttatcaagagcgcacaattaattagagataatataaaaatatacttattgacgttaaagtgcaataggtttctataaaaatgttgtttaattcgtgtactaatattcttttggtgtactttggtataaaatgttattttaatgtaacctattttgtatgctaaatgaaaaacacaccgataatgtaggaaaacctacttattggtgtgtttattaaatgattcatttaacgattatctattttttcgggatataaatcatgattcattaaacgatgctcagccattttttcatatttagaatttggacgtccatagtttgtataaggatcaatagaaattccaccacgtggtgtgaacttgccccaaacttcaatataatgtgggtccataagctctatcaaatcattcataataatattcatacaatcttcgtggaaatcaccgtgatttctgaaactaaataagtataatttcaaagattttgattcaaccattttaacatttggaatatatgaaatatagatagttgcaaaatctggttgcccagtaatcggacataatgatgtaaattctggacagttgaattttacgaaatagtcacgaccttgatgcttattatcaaacgattctaatacatcgggacgatagtcaaaattgtaagtattgtcttgatttcctaataaagttatatcttgtaattcatcttgttgacggccatgtgccatataaagcgctcctttaaatttatttttttattattttggcgtctcggcgtgctttttcaaacatgtaataacttgcaccaataataacgacgtaacctaatgttgcatagaaatctggagattctccgaatagaataaatccaagtattgctgtgaaaattatagatgcatacgtgaaaatagaaatatcttttgctgctgcaaaactatatgctaatgtaacaccaatttgacccacagcggcagctaagccagcccctaatagataaagtatttgcatctgactcattggttcataagtatatgcagtgaaaggtattaaaacgatgacagaaaataaggagaagtaaaatactatagtatatggtgcttctcttgtactaagtgctcgaacacatgtatatgctgatgctgcaaaaatacctgagaataagccagctaatgatggaatcatagatgatgaaaattcaggtttcactattaaaagcatacctaaaatagcaattatcattgctgttatttgatacttccttaccttttcatgtaagaaaacaatgcttaataaaatcgtccagaaaggattaagtttcattaatgaatcggcatcactaagcaccatatgatcaatggcataaatatttaacaatacaccaataagtccaagtgttgatcgtgttattaataagggttgacttgaaagtctgccaaacattggctgatggtatttatatataaaaaataatggaataaacattgctactaagtttcgtgctaatgatttttgaaaaacaggaaggtcacctgcaagtctgaaaaacactgacataaaactgaaaccaatagccgaaattaaaatggcaatgataccttttactttaggattcaattttatcgcctcttttatataaaattaacgtatttatattagcataaaacaacatgttgtgcataaatagttgaaaattactataaaaagactataatagactttaccgaacaaacgttctgtgtttatttgtcggaataatagggcattacacttttatgaatgtttgtgttattacataaaacaaatatcaattcagtatcaagctaataagctttttcttgatttctgttgatacaattgagattgacacagatttaaaaaaatcaagtgatatctactaaaaattttttttaaatttgttcaagtttttctaatttagtattggtgcctagttggaacgttttacgaacattcgattagaaaatggcactttaaatcatagtgtgtcttatgtataatgaaacacataatatagtgttggtaaaacgaaaaagacacaatatcttgtgttttgtatgcaaatgctttatttatgaagaaattacatttaaaagtaatttaacacagaaatttaatagttattatcaattaatagtcatatttttagaaaatgtactgagcaaatggaagatatccaatgatgtaaacactacatatagtgatttttatacattcaacccatataagctactattttctcaaatataaatctatgcaattggtttacatttgagaaaataagtagcttcattatagttaatacaatgctgagataaccatagtaaccatgttgttaaagcattttttaattgtaatgactactttatttaaaagggttgaagaaagaaggtgatccaatgaaaataatatatttttcatttactggaaatgtccgtcgttttattaagagaacagaacttgaaaatacgcttgagattacagcagaaaattgtatggaaccagttcatgaaccgtttattatcgttactggcactattggatttggagaagtaccagaacccgttcaatcttttttagaagttaatcatcaatacatcagaggtgtggcagctagcggtaatcgaaattggggactaaatttcgcaaaagcgggtcgcacgatatcagaagagtataatgtccctttattaatgaagtttgagttacatggaaaaaacaaagacgttattgaatttaagaacaaggtgggtaattttaatgaaaaccatggaagagaaaaagtacaatcatattgaattaaataatgaggtcactaaacgaagagaagatggattctttagtttagaaaaagaccaagaagctttagtagcttatttagaagaagtaaaagacaaaacaatcttcttcgacactgaaatcgagcgtttgcgttatttagtagacaacgatttttatttcaatgtgtttgatatttatagtgaagcggatttaattgaaatcactgattatgcaaaatcaatcccgtttaattttgcaagttatatgtcagctagtaaatttttcaaagattacgctttgaaaacaaatgataaaagtcaatatttagaagactataatcaacacgttgccattgttgctttatacctagcaaatggtaataaagcacaagctaaacaatttatttctgctatggttgaacaaagatatcaaccagcgacaccaacatttttaaacgcaggccgtgcacgtcgtggtgagctagtgtcatgtttcttattagaagtggatgacagcttaaattcaattaactttattgattcaactgcaaaacaattaagtaaaattgggggcggcgttgcaattaacttatctaaattgcgtgcacgtggtgaagcaattaaaggaattaaaggcgtagcgaaaggcgttttacctattgctaagtcacttgaaggtggctttagttatgcagatcaacttggtcaacgccctggtgctggtgctgtgtacttaaatatcttccattatgatgtagaagaatttttagatactaaaaaagtaaatgcggatgaagatttacgtttatctacaatatcaactggtttaattgttccatctaaattcttcgatttagctaaagaaggtaaggacttttatatgtttgcacctcatacagttaaagaagaatatggtgtgacattagacgatatcgatttagaaaaatattatgatgacatggttgcaaacccaaatgttgagaaaaagaaaaagaatgcgcgtgaaatgttgaatttaattgcgcaaacacaattacaatcaggttatccatacttaatgtttaaagataatgctaacagagtgcatccgaattcaaacattggacaaattaaaatgagtaacttatgtacggaaattttccaactacaagaaacttcaattattaacgactatggtattgaagacgaaatcaaacgtgatatttcttgtaacttaggctcattaaatattgttaatgtaatggaaagcggaaaattcagagattcagttcactctggtatggacgcattaactgttgtaagtgatgtagcaaatattcaaaatgcaccaggagttagaaaagctaacagtgaattacattcagttggtcttggtgtgatgaatttacacggttacctagcaaaaaataaaattggttatgagtcagaagaagcaaaagattttgcaaatatcttctttatgatgatgaatttctactcaatcgaacgttcaatggaaatcgctaaagagcgtggtatcaaatatcaagactttgaaaagtctgattatgctaatggcaaatatttcgagttctatacaactcaagaatttgaacctcaattcgaaaaagtacgtgaattattcgacggtatggctattcctacttctgaggattggaagaaactacaacaagatgttgaacaatatggtttatatcatgcatatagattagcaattgctccaacacaaagtatttcttatgttcaaaatgcgacaagctctgtaatgccaatcgttgaccaaattgaacgtcgtacttatggtaatgcggaaacattttaccctatgccattcttatcaccacaaacaatgtggtactacaaatcagcattcaatactgatcagatgaaattaatcgatttaatagcgacaattcaaacgcatattgaccaaggtatctcaacgatactttatgttaattctgaaatttctacacgtgagttagcaagattatatgtatatgcgcactataaaggattaaaatctctttactatactagaaataaattattaagtgtagaagaatgtacaagttgttctatctaacaattaaatgttgaaaatgacaaacagctaatcatctggtctgaattagcagatgattagactgctatgtctgtatttgtcaattattgagtaacattacaggaggaaattatattcatgatagctgttaattggaacacacaagaagatatgacgaatatgttttggagacaaaatatatctcaaatgtgggttgaaacagaatttaaagtatcaaaagacattgcaagttggaagactttatctgaagctgaacaagacacatttaaaaaagcattagctggtttaacaggcttagatacacatcaagcagatgatggcatgcctttagttatgctacatacgactgacttaaggaaaaaagcagtttattcatttatggcgatgatggagcaaatacacgcgaaaagctattcacatattttcacaacactattaccatctagtgaaacaaactacttattagatgaatgggttttagaggaacctcatttaaaatataaatctgataaaattgttgctaattatcacaaactttggggtaaagaagcttcaatatacgaccaatatatggccagagttacgagtgtatttttagaaacattcttattcttctcaggtttctattatccactatatctagctggtcaaggaaaaatgacgacatcaggtgaaatcattcgtaaaattcttttagatgaatctattcatggcgtatttaccggtttagatgcacagcatttacgaaatgaattatctgaaagtgagaagcaaaaagcagaccaagaaatgtataaattgctaaatgacttgtatttaaatgaagagtcatacacaaaaatgttatacgatgatcttggaatcactgaagatgtgctaaactatgttaaatataatggaaataaagcactttcaaatttaggctttgaaccttattttgaggaacgtgaatttaacccaatcattgagaatgccttagatacaacaactaaaaaccatgacttcttctcagtaaaaggtgatggttatgtattagcattaaacgtagaagcattacaagatgatgactttgtatttgacaacaaataacaattaaattaaaagaccttcacatgtaaagagaaatagcgattcgtttcgtcttgactcctacatgttgaaggtctttttttatgtgtatttaaatcattatgagactgagtcagaaatcaatgttctaagatgtacaatgttatttatattggcagtagttggcggggccccaacacagagaatttcgaaatgaaattctacagacaatgcaagttggggtgtgggtctcaacataaagaaaaactttttctttagaaattatcatttccactcatgtattcctttttaagtacacattagctgaggctaatgttaagaatcactacataatcaatcattagtagtttacatcatttcctctattcccagatatcaaaatcttaagtgttctattttactttaagtaaacaaaatacacattctgaaaaattaaatttcagtttaattgcaaatatcaataaaattgacactaaattatttgaaaggctattgaaattatggtcaaaaaacgctactattaatgagaaatattatcaatgataatggttatcattaatttaaagggagaaaaatttgtaatgaagtatttattaaagggaaatattttgcttctattactaatattgttgacaattatttcgttgtttataggtgtgagtgaactatcaattaaagatttactacatttaactgagtcacagcggaatattttattctcaagccgaataccaaggacgatgagtattttaattgctggaagttcgttggctttagcaggcttgataatgcaacaaatgatgcaaaataagtttgttagtccgactacagctggaacgatggaatgggctaaactaggtattttaattgctttattgttctttccaaccggtcatattttattaaaactagtatttgctgttatttgcagtatttgcggtacgtttttatttgttaaaatcattgattttataaaagtgaaagatgtcatttttgtgccgcttttaggaattatgatgggggggattgttgcaagtttcacaaccttcatctcattgcgcacgaatgctgttcaaagcattggtaactggcttaacgggaactttgccattatcacaagtggacgctatgaaattttatatttaagtattcctcttttagcattgacatatctttttgctaatcatttcacgattgtaggaatgggtaaagactttactaataatttaggtttgagttacgaaaaattaattaacatcgcattgtttattactgcaactattacagcattagtagtagtgactgttggaacattaccgttcttaggactagtaataccaaatattatttcaatttatcgaggtgatcatttgaaaaatgctatccctcatacgatgatgttaggtgccatctttgtattattttctgatatagttggcagaattgttgtttatccatatgaaataaatattggtttaacaataggtgtatttggaacaatcattttccttatcttgcttatgaaaggtaggaaaaattatgcgcaacaataataaaaaaataatgcttttaattgcagtaacgttattaattagtatgctgtacttatttgtaggtattgattttgaaatatttgaatatcaattttcaagtcgtttaagaaagttcatattaattattttagtaggtgctgccattgcaacttcagtggtgatttttcaagcgattacaaacaaccgtctattgacaccatcaataatgggcttagatgcagtttatttatttattaaagtattgccagtctttttatttggaattcaatcggtatgggttactaatgtatatttgaactttatattaacacttataacgatggtgttattcgcactaatcctattccaaggtatctttaaaattggacatttttcaatttattttatcttacttattggtgtccttttaggaacattttttagaagtattacaggttttattcaattgattatggatcctgagtcatttttagcaatacaaagtagtatgtttgcaaattttaatgcttctaattcgaatttagttactttctcagcagtgctattagtaatcttattagtcattacaatttttctattgccttatttagatgtattgcttttaggtcgtgctgaagcaattaatcttgggatatcgtatgaaaaattaacgcgaattctacttgtaatagtctcagttttagtttctgtgtcaactgcattagtaggaccaattacatttttaggtttattaactgtaaatctagcgcatgaactaatgaagacgtatgaacataagtatattttaattgcgacaatttgcttgagttggattagtttatttagtgcgcaatgggtagttgaaaatgtgtttgaagctacgacagaaatgagtatacttattgatttgattggtggaagttatttcatttatctattagttagaaggagaaatgcgcaatgattcaagttggaaatttaactaaaactataaataatcaaatgatattggaagatattagcatagatatcgaaaaaggtaaattgacttctttaattggacctaatggtgcgggtaagagtacgttactttcagcgatatgtaggttaattcgttttgataacggtgaagtgaaaatagatggacagctcatgtctgattataaaaataatgacttgtcgaaaaaaatatctatattaaaacaaacaaaccatactgaaatgaatattacggtagagcagttggtaaactttggacgattcccttattctaaaggtcgtttgacgaaagaggatcatgatattgtcaatgatgcgctagatttgttgcaactacaagatatcagaaatcgtaatattaagtcattatctggtggacaacgtcagcgcgcatacattgcaatgacaatagcacaagatactgaatatattttgctagatgaaccattaaataatttagatatgaagcatgctgttcaaattatgcaaacgttaaaaatgttagcgcataaaatgaataaagcgattgtcattgtgttacatgatattaactttgcgtcctgttattcagatcagattgtagcattgaaaaacggacaactagttaaatctgatttgaaagacaatgtcattcaaagcagtgttttaagtgatttatatgacatggatattcaaattgaacatataagaaatcaaaggatttgtttatacttcaaggattgataattaggaaacactttaaaggggtgatgcaccaattaaagaaagtttaactataaagcatttatttatttttcacatcaagcacacagattaagccaaaagaggagaaaattatattatgaagaaaacagtcttatatttagtagtagcagtaatgtttttattagcggcatgcggtaacaattctgataaagaacaatcaaaatcagaaactaaaggttctaaagatacagtgaaaattgaaaataactataaaatgcgtggcgagaaaaaagatggtagcgatgctaaaaaagttaaagaaactgttgaagtaccaaagaaccctaaaaatgcagttgtgttagactatggtgcactagatgtaatgaaagaaatgggcttatcagacaaagtaaaagcattacctaaaggggaaggcggtaagtcattaccgaatttcttagaatcatttaaagatgataaatatacaaacgttggtaatttaaaagaagtgaattttgataaaattgctgcgacgaaacccgaagtaatctttatctctggacgtacagctaatcaaaagaatttagatgaattcaaaaaagctgcacctaaagcgaaaattgtttacgttggtgcagatgaaaagaacttaattagttcaatgaaacaaaatactgaaaatatcggtaaaatatacgataaagaagataaagctaaagaattaaataaagatttagataataaaattgcttcaatgaaagataaaacgaaaaacttcaataaaactgttatgtatttactagttaacgaaggtgaattatcaacatttggacctaaaggtcgttttggtggattagtttacgatacattaggattcaatgcagttgataaaaaagtaagtaatagcaatcatggacaaaatgtttctaacgaatatgttaataaagaaaatccagatgttattttagcgatggatagaggtcaagcggtaagtggtaaatcaactgcgaaacaagcattaaataatcctgtattaaaaaatgttaaagcaattaaagaagacaaagtttataatttagatcctaaattatggtactttgcagctggatcaactacaactacaattaaacaaattgaggaacttgataaagttgtaaaataattttaaaagaggggaacaatggttaaaggtcttaatcattgtttccctcttttctttaaaaaaggaaatctgggacgttaatcaatgtcctagactctaaaatgttctgttgtcagtcgttgggtgaatgaacatgttcttgtaacaagctcatttcaataccagtgggctccaaacatagagaatttcaaaaaggaattatacagaagtggtgctttatcatgtctgtctcacttcctataatgttttggctatgttgtttaaatttcaaaataaatatgatagtgatatttgcagcgattgttaaatcgagattggcaattaggacaacgctcaaccatcatatattcattgattgttaattcgtgtttgcatacaccgcataagattgctttttcgttaaatgaaggctcagaccaacgcttaatggcgtgcttttcaaactcattatggcacttatagcatggatagtatttattacaacatttaaatttaatagcaataatatcttcttcggtaaaataatggcgacagcgtgtttcagtatcgattaatgaaccataaactttaggcataaacaaagctccttaacttacgattcctttggatgttcaccaataatgcgaacttcacgatttaattcaatgccaaatttttctttgacggtcttttgtacataatgaataaggttttcataatctgtagcagttccattgtctacatttaccataaaaccagcgtgtttagttgaaacttcaacgccgccaatacggtaaccttgcaaattagaatcttgtatcaatttacctgcaaaatggccaggcggtctttggaatacactaccacatgaaggatactctaaaggttgtttagattctctacgttctgttaaatcatccattttagcttgtatttcagtcagtttaccaggagctaaagtaaatgcagcttctaatacaactaagtgttctttttgaataatgctattacgataatctaactctaattcttttgttgtaagtttaattaacgagccttgttcgtttacgcaaagcgcatagtctatacaatctttaacttcgccaccataagcgcctgcattcatatacactgcaccaccaattgaacctggaataccacatgcaaattcaaggccagtaagtgcgtaatcacgagcaacacgtgagacatcaataattgcagcgccgctaccggctattatcgcatcatcagatacttcgatatgatctagtgataataaactaattacaatgccacgaataccaccttcacggataataatatttgagccatttcctaaatatgtaacaggaatctcattttgataggcatatttaacaactgcttgtacttcttcatttttagtaggggtaatataaaagtccgcattaccacctgttttagtataagtgtatcgttttaaaggttcatcaactttaattttttcatttgggataagttgttgtaaagcttgatagatgtctttatttatcacttctcagtacatcctttctcatgtctttaatatcatatagtattataccaattttaaaaatcatttgcgaaaattgaaaagaaagtattagaattagtataattataaaatacggcattattgtcgttataagtattttttacatagtttttcaaagtattgttgcttttgcatctcatattgtctaattgttaagctatgttgcaatatttggtgtttttttgtattgaattgcaaagcaatatcatcattagttgataagagataatcaagtgcaagataagattcaaatgtttgggtattcatttgaatgatatgtagacgcacctgttgttttagttcatgaaaattgttaaacttcgccatcataacctttttattatatttatgatgcaaacgataaaaccctacataatttaagcgtttttcatctaaggatgtaatatcatgcaaattttctacacctactaaaatatctaaaattggctctgttgaatatttaaaatgatgcgtaccgccaatatgttttgtatattttactgggctgtctaagaggttgaataataatgattcaatttcagtgtattgtgattgaaaacaattagttaaatcactattaatgaatggttgaacatttgaatacatgataaactcctttgatattgaaaattaatttaatcacgataaagtctggaatactataacataattcattttcataataaacatgtttttgtataatgaatctgttaaggagtgcaatcatgaaaaaaattgttattatcgctgttttagcgattttatttgtagtaataagtgcttgtggtaataaagaaaaagaggcacaacatcaatttactaagcaatttaaagatgttgagcaaaaacaaaaagaattacaacatgtcatggataatatacatttgaaagaaattgatcatctaagtaaaactgatacaactgataaaaatagtaaagaatttaaggcactacaagaagatgttaaaaaccatctcatacctaaatttgaagcatattataagtcagcaaaaaatttgcctgatgatacaatgaaagttaagaaattaaaaaaagaatatatgacgcttgcaaatgagaagaaggatgcgatatatcaattaaaaaaattcataggtttatgtaatcaatctatcaagtataacgaagacattttagattatacgaaacaatttgaaaaaaatagatacaaagttgaatcagaaattaaattagctgataataaaagtgaagcaacaaatcttacgacaaaattagaacataataataaagcgttaagagatactgcgaaaaagaacctagatgatagtaaagaaaatgaagtaaaaggcgcgattaaaaatcacattatgccaatgattgaaaaacaaattaccgatattaaccaaacaaatattagtgataagcatgttaataatgcaaggaaaaacgcaatagaaatgtattacagtctgcagaactattataatacacgtattgaaacaataaaggttagtgagaagttatcaaaagtcgatgtagataagttgccgaaaaagggtatagatataactcacggcgataaagcctttgaaaaaaagcttgaaaaattagaagaaaaataactataatcatttttcaaagttaaaaattttgaatttatggttaacatgtcaacttactatgtgtataatggtaaacattgatattaactatatgtataaaaatgtcacgcagatgctatttaaatgtgataaatatttttagaggtgaatagagtggctataaagctaagttcaattgaccaatttgaacaggttattgaggaaaataaatatgtttttgtattaaaacatagtgaaacttgtccaatatcggcaaatgcgtacgatcaatttaataaatttttatatgaacgcgatatggacggttattatttgattgtccaacaagaacgcgatttgtcagattatattgctaaaaaaacgaacgttaaacatgaatcacctcaagcattttattttgtaaatggtgaaatggtttggaatagagaccacggtgatattaatgtgtcgtcattagcacaagcagaagaataatgaaactatagggttggaacattttgccttacactactagacgtgaatagcacaacttaaattcgtgtgaatcatagtagtttggctataatgatgttctgaccttttattttatataacctttagaagcagttaagttagtacttttttacaaacatatgtataatgtattcgagtatttttattgaaaatattttggaaaacgacgaatccaataagaaaatttaaacatgatttgtaagttagtttaataggaaatatatgctaaaccagaagaaacatactgttatttactggaataattaataatcatgtcatgttaaatgttcgcatataatcacgagataaaatctgaaatttaagattaatcttttatgaataaaaacgtatcacaacaaataataaagtaaggtggtcaaggttatgaaagtattagtagccatggatgagtttcatggaattatttcgagttatcaagctaatagatatgttgaagaggcagttgcaagccaaattgaaactgcagatgtagttcaagtaccattgtttaatggaagacatgaattattagattctgtatttttatggcaatctgggcaaaagtatcgtataccagtacatgatgcagatatgaatgaagttgaaggtgtttacggacaaactgatacagggatgaccgttatcgaggggaatttatttttaaaaggtaaaaagccaattgttgaacgaacaagttatggtttaggagaaatgattaaccatgcattagataacgacgcaaaacatgttgtaatttcattaggtgggattgatagttttgatgctggtgcaggtatgttacaagcattaggtgctcaattctatgatgacgaaggacgtgtcgtagatatgagacaaggtgctggtgtaattaaatatattcgtcgtatggatatgtcgaacttacaccctaaaatggaatcagcaagaattcaagtaatgtcggatttttcaagtcgattatatggtaagcaaagtgaaatcatgcaaacttatgatgcgcatcagttgaatcataatcaagcagcagaaatcgataatttaatttggtattttagtgagttatttaaaagtgaattgaaaattgcaattggtccagttgaacgtggtggtgctggtggtggaattgcggcagtcttgaatggactgtatcaagctgaaatattaaccagtcatgcattagtagaccaactaacacatttagaaaatttagttgaacaagcggatttaattatttttggagaaggattaaatgaaaatgatcagttgctagaaacgacaacattgcgtattgcagaactttgtcataaacatcaaaaggtagccattgcaatttgtgcaactgctgaaaagtttgatttatttgaatcacaaggggttacagcaatgtttaatacctttatcgatatgccggaaacttatactgactttaaaatgggattacaaattaggcattatactgttcagtctttaaaactgttgaaaacacattttaatgttgaggtttagtaaagaaggactaaattggtgatgctgtcatgatggttaataacaattatgatggttagcaaaacgaattagaagattgaaagtatacgtaaaaaatataaaaaatcacgctatcattgcactgaatgttagcgtgattttttttattaattaatcctgagttgaactagtatataatcgttggtttttagttattttcagcgatatcttctacaattccaatgattacttgtactgccttttccatgacatcaatggatgcatattcatatgggccgtggaagttaccgcaacctgtaaagatgtttggagttggtaaccccataaatgacaattgtgaaccatctgtaccaccacgaataggttcagtgtttgctggaatatctaatttagcaaagacacgtttaggtatatcaataatatgaggcaatggtaatattttttctgccatattgaaatattgatccgatatatcaactttaactggataattttcaaaatgggcattgatatcgtcacgtatttctaaaatacgtttcttacgcaattcgaattgttttttatcatgatcacgaataatgtattgcaaagttgctttttcaacagttccttcaaagttcattaagtgataaaagccttcgtatccttcagtgcgctccggaacttcactatcaggtagcaaactatcgaattgttcacctaaacgtattgcgtttaccattgcatttttagctgaaccagggtgaacattcacaccgtggcatgtaataaccgcttcagcagcgttaaagctttcatattgtaattctccatattgactaccatccatagtataagcaaaatcagcattgaagcggtcaacatcaaatttatgtggaccacgaccgatttcttcgtctggtgtaaatccaatgcgaatggtaccatgtttaatttctggatgttcttgtaaataacaaatagcttccataatttccacaatacccgctttatcgtctgcacctagtaacgatgtaccatcagttaccattaatgtatgaccaactaaactgttaagttctggaaatactttaggatctaagacacgtttagtattgcctagtttgtatggcttaccatcatagttttcaataatttgcggtttaacatttgaagcattgaaatcaggtgatgtatcaacatgcgccaaaaatccaactgttgggacgtcggcatcgatgttactttctaatgtagcaaataagtagccattttcatctaaatcagttggcaatcctaattgttgtaattctttttctaataaatgtaacaaatcccattgcttttcagttgaaggtgttgttgtagattttggatcagattgcgtatcaattgtcgtatatcttgttaatctatctatcaattggttcttcattatattcgaccccttaaactctattattcatgttgtaagattttttatatgtcttacctttgattttaccatacagttgtttgatacgtgtgtataggtaatatagaatttcagaaactaatataccgaaagcaatcgcacctgaaatcagtgtaacttctaaaaatgtatttacagcacttgtgtaatcattcgatactaaaaaacgagtcgcttgataagctgcaccaccaggtactaatggtataatgcctggcactatgaatataattaccggtcgtttatatctgcgactcatagtatgactcattaagcctaaaattaagcttcccaaaaatgaagcgccaacttttccaaactctaaatctaccgttaattggtaaatcgtccatgcaatggcacctacaaatccacatgctactaagagacgtttgggtgcattgaaaatgatagagaaaagtactgttgatataaagctgattgtaaaatgaaataaataaaatagcatgctttaacagtccttccttaaatgattaataaaacgattgcgacaccagcaccgattgcgaatgctgttaatgcagcttcaacacctcgggacatacctgcaagtaattcacccgctaataaatctcgaatggcattggtaattaatataccagggacaagtggcatgacactggctatagtaatgatatcttgattggttgcaatacctaatttagtaaatgtggctgcaatggatatgaccacagcggctgcaacaaactctgagaaaaatttaatttgtatatagcgttgcacaaagctgaatgttaaaaatgcggatccaccagcaatgactgcaatccaacaatctgatgcgacaccaccaaacataaataggaagaagccacatgcaatggcagctgcaaagaaattcgttaaaaaagaatattgtaatgatgcatgctgtaaatgaataaattcagatttagcttcatcaattgtgagttctttatttgatattttacgtgaaagactattcgttaaagcgattttctctaaatctgttgtacgctcttgtacacgaattaatcttgtacttgttcgatcgtttaatgaaaaaataattgcagttgaactgacaaaactatatgtattatgaagaccataactatgtgcgatacggttcattgtatcttcaactcgatatgtttcagcacctgattcaagtaaaattctacctgcaattaatacaacatcaatcactttgttttcatctataattgtgattgaatctggcatatcaattcacctccaatgatatgtgttatttatttgaacaattgaagtttacaacttgttgttgcaactttcaatagtgagactttgtgttagtatgatgaacttgtatggttcaaatttaaataagaaaaactgttaatctttgctattatactatgatttaataatagcaaaggattaacagttttgtcgttgttataaattgataatagggttaaacattactttgtttcgcccttggtttttggctacatgcaccatatcgtctgcatctttaaacactttacgctgtgattttggatcgtcatctgttagataaccaacaccgatagacactgacaatttaataacttctttgtttggtaaatggaatgatgatttttcaacacctgaacgaatattttcagctaatttaacactttgatcaagtgaatagttgtgaatgacaactgagaactcttcgccaccatttctaaaaattttaaattgattcggcacatagtttttaagtaattgagacatttgttttaatacagcatcacctgatttgtgtgagtaggtatcattgacatctttaaatccatcgatatcgattaataataatgcgatactttgatgttctttttcagcttttcgtgaaatttcatttaaatgtctatcaaattcttttacattacctaagcctgttaagtaatcatatttatcttcgttttcataacgatttacgagtgagaagaaatgccaaatatcgacaaatgttatcgctgaagctaaagtgataattaatgaaattggtattaaaatgataacttccgatagtgtgtaaataggactcactaatgcgacaccaaataaaatgattattgtaacaacattaagtattaataatgatagcacatcattttgttttaaaaatggtccaatagcacttgttactgcagcaataacaatcaacgtaacaccgtacataatcgagttgttaaatactacaatttcaacaattgctacaattactgtggcagataatgtatagaccatatttgtaaatctacctaaaaacaataaaggaacgaatgttaagtgaattaaataatcttcacgataagggatagggtagacagataataataatgatacgattgtcattaaaacagtgacataagccttagaaaaaaccatacgtttgttttctgaatactgtaagcgatggaataaatagattccagcgactataacagatatattgtatataaatgcttcgaacatgtctgaatcgactcctttaattgaccactagctattgtaagtgaaaacttacaatttgtcattagtttacatataaaattaatgtatgatatagactttgatgttaaaatgttgccttaaatgatatgatgaaaaaatgaataataggcgatatataagaaatgaatcgtatagttgtaaatatgatatcattgattgagcgaattaatttataataaagctataagatatacgtagaaaatagatatatcattctataaagacaatattaaataaatataacgttaaaaacaattaatatcgatgaaggtgaataaatggttacattattactagttgcagtaacaatgattgtcagtttgacgataacaccaattgttattgcaatatcgaaaagattaaatttagttgataaaccaaattttagaaaagtacacactaaacctatttcagttatgggtggtacagtgattctcttttcatttttaataggtatttggattggtcatcctattgaaacagaaatcaaaccacttattattggtgcgattattatgtacgtacttgggcttgtagatgatatctacgatttgaaaccgtatataaaattggctggtcaaattgccgctgccttagtagttgctttttatggtgtgactattgattttatttcgttgccaatgggtacaacgattcattttggatttcttagtattccgattactgtgatttggattgttgctattacaaatgcaattaacttaattgatggacttgatggtttggcgtcgggtgtttctgcaatagggctcattacaataggattcattgcaattttacaagctaatattttcataacgatgatttgttgtgttttattaggctctttaattgggtttttattttacaatttccatcctgccaaaatatttttaggtgatagtggggctttaatgattggatttatcatcggatttctttctttactcggattcaaaaatattacaattattgcattgttcttcccaattgttatcttagcagttccattcattgatactttgttcgcaatgattcgacgtgtgaaaaaaggacagcatataatgcaagctgataaatcgcatttgcatcataaactattagctttaggctacacacatagacaaacagtattattaatctattcaatctctattttatttagtctttcgagcattatcttgtatgtatcgccaccattaggtgttgtattaatgtttgtattaatcatatttagtattgaattaattgttgaatttacaggattaatagataacaactatcgaccaatattaaatttaattagtcgtaagtcatctcataaagaggaatagggaatgaaagcatagctgtatgggataatttgtattatatggctttactctttacaattttttatgtattaaatttcaaatataaaaaagcactgccataaacgtgtacttcaattgtcatttaataatacgcaattgatatttaccgtcttatgatagtgctttttatttttattcagttggtatatcgaaaggcaactgctttggagtttcttcagtcaaatcgaaatttccagcagtcatttgatttaaaaagttaataaacgcttcatagtcacttttaacgacatcgatatagtagcttaccttatcagtgtaagtttggtttcttaacataaaatgagttgaagctaattcatattcaaatttaccagtttgatcataattcagtgttactatacatggtactgcttctcgtagttcgacacgtccgatatcataaatgacgtctctaacagcaccgctataggcgcgaattaaaccgccaccacctaatttaataccaccaaaatatcttgttactacgacacacgcattatgaacatcgagcttttttaatatgtctaacattgggacaccggcagttcctgtcggttcaccatcatcattcgctttttgaatattcatttcaggtccaatagtatatgcagaacaattatgagtggcatctttatgttctttttttattgcagcaataaatgctttagcttcatcttcattttgaacaggtttgatatgagcaatgaatcttgatttactaatcacattttcaataatgtgttcttttttaacagtaatgatattttgtgtcataataactccttaattcataagcttaagattatttaatcttcattatacactgaaaatgacatgactataaatcgtttgattgccattttctttttaactgaaatattgtatcattgctatgagtatattttaggaggacgactatgaaaattgctgtgatgaccgattctacaagttatctgtcgcaggacttaatcgataaatataatattcaaatagcgccattaagtgtgacttttgatgatgggaagaactttacagaaagtaatgaaatagcaattgaagaattttataataaaatggcatcgtctcaaacgattccaacaacaagccaaccagcaattggcgaatggattactaaatatgaaatgttaagagatcaaggttacacagatatcattgttatttgcttatcaagtggaattagtggaagttatcaatctagttatcaagcaggggaaatggttgaaggtgttaatgtacatgcatttgatagtaagcttgcagcaatgattgaaggatgttatgtattacgtgctattgaaatggttgaagaaggatacgaaccacagcaaattattgatgatttaactaatatgcgtgaacacacaggtgcatatttaattgttgatgacttaaagaatttacaaaaaagtggtcgaattactggtgctcaagcatgggttggaacattattgaaaatgaagccagttcttaagtttgaagatggcaagattataccagaagaaaaagttcgtactaaaaagcgtgccattcaaacattagaaaagaaagtattagatatagtaaaagactttgaagaagtaactttatttgtcataaatggagatcatttcgaagatggtcaagcgttatacaaaaagttacaagatgattgtccttcagcttatcaagtagcatactctgagtttggtccagttgttgcagcacatttaggttctggtggattaggtttaggctatgttggcagaaaaataagattaacataattataaaattttaataaaagagtctatattgtaattggaaattatctcttgcatacatggctttaaatgttcatcatttgaaagtcaaaatgctaaagatataagaaaatcattataatattaggctcttttttacgttgaaatgaggttttaagcattaaacattacgggaaattaattcatcctcatacttcacttactaatgaaaaaattaaaaaagaagtaacaggtgtcatcaaacaaaattcaaactattattgtgttcaatgtgaaagtacaaatccaaagcatttttatcagtatgattccttagtacattccaagaaaattgtatattgcagaagttgtatatcactgggtcgaatggataatgtaacaagatataaaataacagagagttcgcaaagttcatcacaagcatattatcatctctcatttgaattgtcggaacagcagtcttatgcctcagaacatattgttcgagccattagaatgagacaaacgattttgttatatgcagtaacaggtgcaggtaagacagaaatgatgtttcaaggcattcaatatgcaagacgacagggagataatatagctattgtgtcaccacgtgtagatgttgttgtagaaattagtaaacgtattaaagacgcatttcttaatgaagatatagacatactacaccagcaatcaagtcaacaatttgaagggcattttgttgtatgcacagtgcatcaactttaccgattcaaacagcactttgatactatttttattgatgaagtcgatgcctttcctttatcaatggataaaagtttacaacaagcattgaagtcatcttctaaagttgaacatgcaacgatttatatgacggcaacaccaccgaaacaacttctgtcagagattccccacgaaaatataattaaattgccagctcgctttcataaaaaatcacttccagttcctaaatatcgctatttcaaacttaataataataagattcagaaaatgttatatcgaattttacaagatcaaattaataaacaacgttatacactggtgttttttaacaatatagaaacaatgattaaaacattttcggtttataagcagaaaattactaaattaacatatgtccatagcgaggatgtttttcgctttgaaaaagttgaacaattaaggaatggacatttcgatgtcatttttactacgacaatattagaacgtggatttacaatggcaaatttggatgttgttgttatcgatgcacatcaatatactcaagaggctttaatacaaattgctggacgtgttggacgaaaattagaatgtcctactggaaaagtattgttttttcatgaaggagtaagtatgaatatgattcaagcaaaaaaagagattcaaaaaatgaacaaattagcattaaaaagaggttggattgatgaataattgtttgagttgtggtgctaagttatatgaaaatataaccatttataatttgttcaagaaacctaatagattatgtgacagatgcaaagagaattgggacaatattaaacttgatattaaagcaaggcgatgttcaaggtgcttaaaacacttaaatcaaaatgaagcgtattgtttagactgcaagtttctatcggcacactttaatttaatggaacaattatattgtcaatttcaatatgacggtttaatgaaagagatgatacatcagtataaatttttgaaagactattatttatgtgaattattggcacatttgattgaaataccacaaacatcttatgactatattgtgccaattccttcttcgccggcacatgatttatctagaacatttaacccggtagaagcagtactaaaagctaaagggattcgctttgataagattttaaagatgtcaaatagaccaaaacagtctcatttaactaagaaagagcgtctggcagatgaaaatccatttattattgatacagaattagatttaaatggcaaggaaatattactcgttgacgatatttatacaactggattaacaattcatcgtgcagggtgtaaattatacgctaaaaatatcagaaaattcaaagtgtttgcgtttgcacgatagcgtaaaaatgttaaaatataataaagagttaccaataaagaggtttaaggagagattactatgattagatttgaaattcatggagataacctcactatcacagatgctattcgcaactatattgaggaaaaaattggtaagttggaacgttattttaatgacgtaccaaatgcagtggcgcatgttaaagttaaaacttattcaaattcagctactaaaattgaagtaacaattccattaaaaaatgttacgttaagagctgaagagagaaacgatgatttatacgcaggtattgatttaattaataataaacttgaaagacaagttcgaaaatataaaacacgtattaatcgtaagagccgtgatcgaggagatcaagaagtgtttgttgccgaattacaagaaatgcaagaaacacaagttgataatgacgcttacgatgataacgagatagaaattattcgttcaaaagaattcagcttaaaaccaatggattcagaagaagcggtattacaaatgaatctattaggtcatgacttctttgtattcacagacagagaaactgatggaacaagtatcgtttaccgccgtaaagacggtaaatatggcttgattcaaactagtgaacaataaattaagtttaaagcacttgtgtttttgcacaagtgcttttttatactccaaaagcaatttctgactatttcatagttcgataatgtaatttgttgaatgaaacatagtgactatgctaatgttaatggatgtatatatttgaatgttaagttaataatagtatgtcagtctattgtatagtccgagtcgaaaatcgtaaaatatttataatataatttattaggaagtataattgcgtattgagaatatatttattagtgataaacttgttgacaacagaatgtgaatgaagtatgtcataaatatatttatattgattctacaaatgagtaaataagtataattttctaactataaatgataagatatattgttgtaggccaaacagttttttagctaaaggagcgaacgaaatgggatttttatcaaaaattcttgatggcaataataaagaaattaaacagttaggtaaacttgctgataaagtaatcgctttagaagaaaaaacggcaattttaactgatgaagaaattcgtaataaaacgaaacaattccaaacagaattagctgacattgataatgtcaaaaagcaaaatgattatttagataaaattttaccagaagcatatgcacttgttagagaaggctctaaacgtgtattcaatatgacaccatataaagttcaaattatgggtggtattgcaattcataaaggtgatatcgctgagatgagaacaggtgaaggtaaaacattaacagcgacaatgccaacatacttaaatgcattagctggtagaggtgttcacgttattacagtcaatgaatacttatcaagtgttcaaagtgaagaaatggctgagttatataacttcttaggtttgactgtcggattaaacttaaacagtaagacgacagaagaaaaacgtgaagcatacgcacaagacattacttacagtactaataatgagctaggttttgattacttacgagataacatggtgaattattctgaagatagagtaatgcgtccattacattttgcaatcattgatgaggttgactcaattttaatcgacgaagcacgtacgccattaattatttctggtgaagctgaaaagtcaacgtcactttatacacaagcaaatgtttttgcgaaaatgttaaaacaggacgaagattataaatacgatgaaaaaacgaaagccgtacatttaacagaacaaggtgcggataaagctgaacgcatgttcaaagttgaaaacttatatgatgtacaaaatgttgatgttattagtcatatcaacacagctttacgtgcgcacgttacattacaacgtgacgtagactatatggttgttgatggcgaagtattaattgtcgatcaatttacaggacgtacaatgccaggccgtcgtttctcggaaggtttacaccaagctattgaagcgaaggaaggcgttcaaattcaaaatgaatctaaaactatggcgtctattacattccaaaactatttcagaatgtacaataaacttgcgggtatgacaggtacagctaaaactgaagaagaagaatttagaaatatttataacatgacagtaactcaaattccgactaataaacctgtgcaacgtaacgataagtctgatttaatctacattagccaaaaaggtaaatttgatgcagtagtagaagatgttgttgaaaaacacaaggcagggcaaccagtgctattaggtactgttgcagttgagacttctgaatatatttcaaatttacttaaaaaacgcggtatccgtcatgatgtgttaaatgcgaaaaatcatgaacgtgaagctgaaattgttgcaggcgctggacaaaaaggtgccgttactatcgccactaacatggctggtcgtggtacagatatcaaattaggtgaaggcgtagaggaattaggcggtttagcagtaataggtacagaacgacatgaatctcgtcgtattgatgatcagttacgtggtcgttctggacgtcaaggtgataaaggggatagtcgcttctatttatcattacaagatgaattaatgattcgttttggttctgaacgtttacagaagatgatgagccgactaggtttagatgactctacaccaattgaatcaaaaatggtatcaagagctgtagaatcagcacaaaaacgtgtagaaggaaataacttcgacgcgcgtaaacgtatcttagaatacgatgaagtattacgtaaacaacgtgaaattatctataacgaaagaaatagtattattgatgaagaagatagctctcaagttgtagatgcaatgctacgttcaacgttacaacgtagtatcaattactatattaatacagcagatgacgagcctgaatatcaaccattcatcgactacattaatgacattttcttacaagaaggtgacattacagaggatgatatcaaaggtaaagatgctgaagatattttcgaagtcgtttgggctaagattgaagcagcatatcaaagtcaaaaagatatcttagaagaacaaatgaatgagtttgagcgtatgattttacttcgttctattgatagccattggactgatcatatcgacacaatggatcaattacgtcaaggtattcacttacgttcttatgcacagcaaaatccattacgtgactatcaaaatgaaggtcatgaattatttgatatcatgatgcaaaatatcgaagaagatacttgtaaattcattttaaaatctgtagtacaagttgaagataatattgaacgtgaaaaaacaacagagtttggtgaagcgaagcacgtttcagctgaagatggtaaagaaaaagtgaaaccgaaaccaatcgttaaaggcgatcaagttggtcgtaacgatgattgtccatgtggtagtggtaaaaaattcaaaaattgccatggaaaataaatgatataaaataactccttccaattaaacacctatagtttgtgttatgggaggagtctttttattttacaagcgttaaatacttaaaaaaatgtgaagaagttgttaaacgttgttatgtacttagtttaaaaaataggtttaagcatatgtcgatgataaatgtactgatttttaacaataaaagcataaactaattgacaatgtgcttatatttcttaacattgttatttaacaaaattatgttaaaatttagcattataaaagatacaaatcaatgacttgaattgaattataaataggagcgaaggctatggaattatcagaaatcaaacgaaatatagataagtataatcaagatttaacacaaattagggggtctctttgacttagagaacaaagaaactaatattcaagaatatgaagaaatgatggcagaacctaatttttgggataaccaaacgaaagcgcaagatattatagataaaaataatgcgttaaaagcaatagttaatggttataaaacactacaagcagaagtagatgacatggatgctacttgggatttattacaagaagaatttgatgaagaaatgaaagaagacttagagcaagaggtcattaattttaaggctaaagtggatgaatacgaattgcaattattattagatgggcctcacgatgccaataacgcaattctagagttacatcctggtgcaggtggcacggagtctcaagattgggctaatatgctatttagaatgtatcaacgttattgtgagaagaaaggttttaaagttgaaactgttgattatttacctggagatgaagcggggattaaaagtgtaacattgctcatcaaagggcataatgcttatggttatttaaaagctgaaaaaggtgtacaccgactagtacgaatttctccatttgattcatcaggacgtcgccatacatcatttgcatcatgcgacgtgattccagattttaataatgatgaaatagagattgaaatcaatccggatgatattacagttgatacattcagagcttctggtgcgggtggtcagcatattaacaaaactgaatcggcaatacgaattacccaccacccctcaggtatagttgttaataaccaaaatgaacgttctcaaattaaaaaccgtgaagcagctatgaaaatgttaaagtctaaattatatcaattaaaattggaagagcaggcacgtgaaatggctgaaattcgtggcgaacaaaaagaaatcggatggggaagccaaattagatcatatgttttccatccatactcaatggtgaaagatcatcgtacgaacgaagaaacaggtaaggttgatgcagtgatggatggagacattggaccatttatcgaatcatatttaagacagacaatgtcgcacgattaatatatattttaaaaccgaggctctaaaagggcatcggtttttggtttttataaaggtagctaaataaattgtaaattagattttgaaatatgatttgtttatgaatatttaagaacaattcggtagataggtttagaatatattttttaaaagttgtgtttgttaaaacaacatatgcagtgtgcatttagtaatattacctatggcgattttcaaggtattgaattaattattgaaaacgttctcaattatatggtatgaatacattttacactatgataaaagtttgtattctttttatattgttaaccatttgattacatcgttataacaatagcttttgacaaaatgtattgtgctatagtatttgcatacttaaaatactaacagcaaaggaatgacagcaagatgaaaaaatctcttacggtgacggtttcgtcagtgttagcttttttagctttaaataatgcagcacatgcacaacaacatggcacacaagtaaaaacacctgttcaacataattatgtatcaaatgttcaagcacaaacgcaatcaccgacaacttatacagtagttgctggcgattcattatataaaattgctttagagcatcacttaacgttgaatcaattatattcatacaatcctggtgtaacacctttaatttttcctggtgacgtgatttcacttgtgcctcaaaataaagtgaaacaaactaaagtggttaaatcaccagtaagaaaagcaagccaagctaaaaaggtagtaaaacaacctgtacaacaagcgtctaaaaaagtagtagttaatcaagcacctaagcaagcagtagctaagacagttaatgtagcatacaaacctgcccaagtacaaaaatcagtaccaactgtacctgttgcacataactacaataaatcagttgctaacagaggaaacttatatgcttatggaaactgcacatattatgctttcgatcgtcgtgcacaattaggtagaagtataggaagtttatggggcaatgcaaataactggaattacgcagcaaaagttgcaggatttaaagtagataaaacaccagaagttggcgctattttccaaacagctgctggtccatatggacatgttggtgttgttgaatctgtaaaccctaatggaacaattactgtttcggaaatgaactatgctggatttaatgttaaatcttcaagaacaattttaaatccaggaaaatataattacatccactaagtaatatatcaagacaagactatcctcttagcctgtttaagtaacaggttgagaggattttttatgaaaagaacaggctgggacataaatccctaaaaaacagcagtaagataattttcaattagaaaatattttactgcttttttttagggatttatgtcccagcctgttgattggtatcatttaatcagagttatataaagaagatatttaaatgatatttaattgaatgatatgtaaaaagaaagtataatttatgattaattaatggaggaggtaattgaaatgggtgtacatcaatattttaaaagattatcagatatggaaagacttataagattacctggaaaatttaaatattttgaacacaatgttgcagcacactcctttaaagtaactaaaattgctcaatatctagcaacagttgaagaatatcatggacgaaagattaattggaaaagcttatatgaaaaagcattaaatcatgatttcgctgaagtgtttactggtgatataaaaacacctgttaaatatgcgagtagtgaattaaaaaaattattttcgcaagttgaagaagaaatggtagaaacctttattgaagaagaaattccattacaatatagagatgtttataagcaacgactgcaagaaggtaaagatgattcattagaaggccaaatactttcagttgctgataaaattgatttgctttatgaaacatttggagaaatacaaaaacgtaatcccgaagaattatttttcgaaatttatgaaatgagtctagaaacaattattcaatttgaccatttagcatctgtacaagattttattaataatatcattccagaaatgttgactgaaaactttatacctagaacagaattaagagaaacaaccatgaacattttaaataaaagaaaagaggaaaatgaatgatatggtattttagcgcagcattctttccatgtgtcctggtagtattgtttagtgtaataacaagaagtaaatgggtcggtactattctgacattaattttaattggtgcctcaatctataaagagtatttccataacgagtggattatttttattgatgtagtgtcattattagctggttatttaattatagatcaactcgaatttcataaacatcaagatgaagatcgctaagattaactttaaaataatgtttcaaacaaatttgttgaaacaaaacgatgattaatataatgtgtatttacatactaaaaataacaagataaacgatttgatttaatgcaagcatagttagcacaactatgtttgtttttctttgttcgacatttttacgaacaaacgtttgctttttgtgtgactactttgctaaaatatgtaatgagaaagcgaagagttgagcggaaatataaataatacgttgaaagaggaggcatatgtgacaatggttgaacattatccttttaaaatacattctgattttgagcctcaaggtgaccaaccgcaagcaattaaggaaatcgtggaaggtattaaagcggggaaaagacatcaaactttattaggtgcaactggcacagggaaaacatttacgatgagtaatgttattaaagaagttgggaaaccaacgttaattatcgcgcataacaaaacattagcaggacaattatatagtgagtttaaagaattttttcctgaaaacagggtggaatactttgtaagttactatgattattatcaacctgaggcatacgtaccgtctactgacacttttattgaaaaagatgcctcaatcaatgatgaaattgatcaactacgacattctgctacaagtgcattatttgaacgcgatgatgtaattattattgctagtgtaagttgtatatatggtttaggtaatcctgaagaatataaagatttagtagtaagtgttcgagttggtatggaaatggatagaagtgaattacttagaaaacttgtagatgtgcaatatacaagaaatgacatcgatttccaacgaggaacgtttcgagtgcgtggtgatgtagttgaaatattcccagcctctaaagaagaactttgtataagggttgagtttttcggcgatgagattgaccgtattcgagaagttaactacctaacaggtgaagtgttgaaagaaagagaacattttgcgatattcccagcttctcacttcgtaacacgtgaagaaaagttgaaagttgcgattgaacgtattgaaaaagaattggaagaacgattgaaagaattacgagatgagaataaattactagaagcgcaaaggttagaacagcgtaccaactatgatttagaaatgatgcgagaaatgggattctgttcaggaattgaaaactattcagtacatttaacgttgcgaccactaggttcgacaccatatactttattggattactttggcgatgattggttaataatgattgatgaatcacatgtgacgttaccgcaagttcgtggcatgtataacggagacagagcacgaaaacaagttttagttgatcatggatttagattaccaagtgcgttagataaccgcccacttaaatttgaagaatttgaagaaaagacgaaacaacttgtgtatgtatctgcaacgcctggtccatacgaaattgaacatacggataagatggttgaacaaattattcgtcctactggtttactggaccctaagattgaggttagacctactgaaaatcaaattgacgatttattaagtgaaattcaaacaagggttgagcgtaatgaaagagtacttgttacaacactcactaaaaagatgagtgaagatttaaccacatatatgaaagaagcaggcattaaagttaactatctacattctgaaattaaaacattagaacgaatcgaaataattagagacttacgaatgggtacatatgatgttatcgtaggtattaatttattaagagagggtattgatataccagaagtttctctagttgtcatattagatgcagataaagaaggatttttacgttctaatcgctcattaattcaaacaataggtagagctgcgcgtaacgataaaggtgaagtcattatgtatgccgataaaatgactgattcgatgaagtatgcaattgatgagacacaacgtcgtcgagaaatacagatgaaacataatgaaaaacatggtattacgcctaaaacaattaataaaaagatacatgatttaattagtgctactgttgaaaatgacgaaaataatgacaaagcacaaactgtgatacctaagaagatgacgaaaaaagaacgtcaaaagacaatcgacaatatagaaaaagaaatgaaacaagcagcgaaagatttagatttcgagaaagctacagaattaagagatatgttatttgaattaaaagcagaagggtgacaagtaaatgaaagaaccatccatagtagtaaaaggtgctcgtgcgcataacttgaaagatattgatatcgaactacctaaaaataaattaattgttatgacaggattatctgggtcaggtaaatcgtcattagcattcgatactatatatgctgaaggacaacgacgttatgttgaatcattaagtgcgtatgcgcgtcaatttttaggccaaatggacaaaccagatgttgatacaattgaaggattatcgccagcaatttcaatagatcaaaaaacaacaagtaaaaatccaagatcaactgtagcaacagtaacagaaatatatgattatatacgtttgttatatgcacgcgttggtaaaccttactgtccaaatcacaatatagaaattgaatcgcaaacagtacaacaaatggttgaccgcattatggaattagaggcacgtacaaagattcaattattagcacctgtcatcgctcatcgtaaaggtagtcatgaaaagctaatcgaagatattggtaaaaaaggttatgtacgtttaagaatcgatggcgaaattgttgatgtaaatgatgtacctacattagataagaacaagaatcatacaatagaagttgttgtagaccgattagttgttaaagatggaattgaaacacgactagctgactctatagaaactgcgttagagctttcagaaggacaattaacagttgatgttattgacggggaagaccttaagttttcagaaagccacgcttgtcctatatgtggattttcaatcggagaattagaaccaagaatgtttagctttaacagtccttttggtgcttgtccaacatgtgatggcttagggcaaaagttaacagtcgatgtagacttggttgttcctgacaaagataagacactaaacgaaggtgcaatagaaccttggataccgacgagttctgatttttatccaacattgttaaaacgtgtttgtgaagtttataaaatcaatatggataaaccttttaaaaagttaacagaacgtcaacgtgatattttattgtatggttcgggtgacaaagaaattgaatttacatttacacaacgtcaaggtggtactagaaaacgaacaatggtcttcgagggtgtagttcctaatataagtagacgattccacgaatcaccttcagaatatacacgtgaaatgatgagtaaatatatgaccgaactaccttgcgaaacttgtcatggaaagcgattgagtcgtgaagcgttatctgtttatgtaggtggtttaaatattggtgaagtagtcgaatactcaatcagtcaagcgctgaactattataaaaacattaatttgtcagaacaagatcaagcgattgcaaatcaaatattgaaagaaattatttctcgactcacttttttaaataatgtgggacttgaatatttaacgctaaacagagcttcaggtacactttcaggtggtgaagcacaacgtattcgattagcaacgcaaattgggtcacgtttgactggtgtcttatatgtattagatgagccatcaattggactgcatcaaagagataatgatcgattaattaatacacttaaagaaatgagagatttaggaaatactttaattgtagttgaacacgatgatgatacaatgcgtgcggctgattacttagtggacatagggcctggtgctggtgagcatggaggacagattgtgtctagtggtacacctcaaaaggtaatgaaagataaaaaatctttaacaggacaatacttgagtggtaagaaacgtattgaagtacctgaatatcgcagaccggcttcagatcgtaaaatttctatacgtggagctagaagtaacaaccttaaaggggttgatgtggacataccactatcaatcatgacggtcgttacaggtgtatcaggttcaggtaaaagctcattagtaaatgaagtattatacaaatcattagctcaaaaaatcaataaatctaaagtaaagccaggattgtacgataagattgaaggtattgatcaacttgataaaattattgatattgatcaatcaccgataggtagaacgccacgctctaatccagcaacgtatactggtgtgtttgatgatatacgtgatgtgtttgcgcaaacaaatgaagctaaaattcgaggatatcaaaaaggccgttttagttttaatgtaaaaggtggacgctgtgaagcttgtaaaggtgacggtattattaaaattgaaatgcattttttacctgatgtttatgttccttgtgaagtgtgtgatggtaaacgatataatcgtgagacactagaggttacttacaaaggtaaaaatattgctgacattttagaaatgactgttgaagaggcaacacaattttttgaaaacattcctaagattaagcgcaagctacaaacactagttgatgttggtcttggatacgtcacattaggtcaacaagctacaacgttatcaggtggtgaggctcaacgtgtgaaacttgcatctgaacttcataaacgttcaactggtaaatctatttatatcctagacgaaccgacaacagggttacatgttgacgatattagtagattattaaaagtattaaaccgattagttgaaaatggtgatactgttgtaattattgaacataacctagatgttatcaaaacagcagactatattatagacttaggtcctgaaggtggtagtggcggtggtactattgttgcgactggcacacctgaagatattgctcagacaaagtcatcatttacaggaaagtatttaaaagaagtacttgaccgagataaacaaaatactgaagataaataagataaaaagaagtgaaggatgttataaatttatccttcgcttctttttattaatttagtaatgaatagtagaaagaaaagatgcgtaaaaagaattatgttaagatagggtcaatctagagttgctaaacataaatcgaaactgagagtgggacagaaatgataaagaatcactaatgatttattatgtagtgattctttgtcattcgccacaactattgtgtacttaaaaataggaatgcatgagtgcgactcatgcataagaaatactaatttctaaagaaaaagtatttctttatgttggggcccaccccaacttgcacattatggtaagctaactttccgtcagcttttatgttggggccccgccaacttgcattgtttgtagaatttcttttcgaaattctctgtgttgggctcaccccaacttccattgcctgtagaaattggtgttccaatttctttatgtgggggccccgccaactaattccaatatatcattgtagagcttaggtcattgatttatggctcggacttttatggcgatatgaaccatgtaaattaagcaagcaataaattaatgattgatattgacttgtaaaataataacaataaggaacaattaatatttattttagcttttcaatgtagattggtgttatatttttgatatgataagaagagatgtaagagtagggataaatacaattgaggtgaacccatgttaacgacagaaaaactagttgaaacattaaagttagatttaatcgctggtgaagaaggactatcgaagccaattaaaaatgctgatatatcaagaccgggcttagagatggcaggttatttttcacattatgcgtcagatagaatacaactattaggaacaacggaactatcgttttacaatttattaccagataaggaccgcgcaggtcgtatgcgtaaactatgcagaccagaaacgcctgcaattattgtgacacgtggattgcagccaccagaagaattagttgaagctgcaaaagaattaaatacgccacttatagttgctaaagatgcgactacaagtttaatgagtcgcttaacaacgtttttagagcatgcacttgcaaagacgacatctttacatggtgttttagtagatgtttacggtgttggtgtactaattaccggtgattcaggaataggtaaaagtgagactgcgttggagttagttaaacgtgggcatagattagtagcagatgataatgtagaaatacgtcaaattaataaagatgaactaataggcaaaccaccaaagttaatagaacatctattagaaatacgtggactaggtattatcaatgttatgactttatttggcgcgggttcaatattaactgaaaaacgaattagattaaatattaatttggaaaactggaacaagcaaaagttatatgaccgcgtcggtcttaatgaagagacgttaagtattttagatactgaaatcactaaaaaaacaatacctgtaagacctggtagaaatgttgcggtaattattgaggtcgctgcaatgaactatcgattaaatatcatgggcattaacactgccgaagaatttagtgaaagattaaatgaagaaattatcaagaacagtcataagagtgaggagtaggttgaatgggtattgtatttaactatatagatcctgtggcatttaacttaggaccactgagtgtgcgatggtatggaattatcattgctgtcggaatactacttggttactttgttgcacaacgtgcactagttaaagcaggattacataaagatactttagtagatattattttttatagtgcactatttggatttatcgcggcacgcatctatttcgtgattttccaatggccatattatgcggaaaatccaggtgaaattattaaaatatggcatggtggtatagcaatacatggtggtttaataggtggctttattgctggtgttattgtgtgtaaagtgaaaaatttaaacccatttcaaattggtgatatcgttgcgccaagtataattttagcgcaaggaattggacgctggggtaactttatgaatcacgaggcacatggtggacctgtgtcacgcgcttttttagaacaattacatttgcctaattttataatagaaaatatgtatattaacggccaatattatcatccaacattcttatatgaatccatttgggatgtcgctggatttattatcttagttaatattcgtaaacatttaaaattaggagacacattctttttatatttaacttggtattcaattggtcgattctttatagaaggattacgtacagatagcttaatgctcacaagtaatattagagttgcacaattagtatcaattcttttaattttaataagtataagtttaattgtatatagaaggattaagtataatccaccgttgtatagcaaagttggggcgcttccatggccaacaaaaaaagtgaagtagtgatattttgagaaaatttttatcaaaaacatatcatcatacaaaccctttatggcatgtataccgtcttgttaaattttcgaaagtttttaaaaatgtaatcatcattgaattttcgaaatttattccaagtatggtactgaaaagacatatatataaacaacttttaaatattaatatcggtaatcaatcgtcgatagcttataaagtaatgttagatattttttacccagaactgattacgattggtagtaacagtgttattggttacaatgtaacaattttgacgcatgaagcattagttgatgaatttcgttatggaccagtgacgataggatctaacactttgattggtgcaaatgctatcattttacccggtataacgattggtgacaatgtaaaagttgcagctggtacggttgtttcaaaagatataccggataatggatttgcatatggcaaccctatgtatataaaaatgattaggaggtgacaattttatggcgcaaaagaataataatgtaattccaatgacttttgatgatgcattttatcgtaaaatggctaatcagaagtttaaacaaagagaatataaacgagctgctgaatactttgaaaaagtgttagaattgtcacctgatgatctggaaattcaaattgattatgcacaatgtctagtgcaacttggtattgctaaaaaagcagaacatttattttatgacaatattatttataataggcatctagaagatagcttttatgaattgagtcagctcaacattgaagttaacgaaccaaacaaggcattcttgtttggtattaattatgttattgttagcgacgaccaagattatagagatgaattagaccaaatgtttgatgtgaaatatcaaagtgaagaacaaattgaacttgaagctcaattgtttgtagttcaaatactattccaatatcttttttctcaaggtcgattaaaagatgcaaagaattatgtcttacatcaaccacaagaagttcaagatcatcgtgtcgtacgtaatttactggcaatgtgttatttatatctcggcgaatatgacacggctaaagcattgtacgaagcactattacaagaggatagtacagatatatatgcattatgccattatactttgctactttataacactaaggaaaatgaacaataccaaaagtatttaaaaatattaaataaagttgtacctatgaatgacgatgaaagttttaaattaggtattgttttaagttatttaaagcagtatcgtgcatcacaacaattgttgtaccctttatataaaaaagggaaatttttatcaattcaaatgtacaatgctttagcatataattattattatttaggtgaagaagacgaaagtcattactactgggataaattgaagcaaatttctaaagtggaaattggacatgctccttgggaaattgaaaatagcaaagaagtttttgaccaacatattttgccattacttcaaagtgatgacagtcattatcgtttatatggtatttttttattggatcaattaaatggcaaagaaattgtgatgacggaaagtatttggcaggttctggaaaatctaaataattatgagaaattgtatttaacgtatttagttcaaggtttaacgctcaataaattagacttcattcatcgcggcttgttaacgctttaccataatgaattatttgtaagtgaaaatgatttaatggttgcatggattaatcaaggtgaactcataattgctgaaaaagtagatttaactgatgttgagccatatatcggtgcgtttatttatttgtattttaaaaatcaacctcgaaacgtttcaaagaagcaaattacaacatggttaggcataacacaatataaactgaacaaaatgattgaatttctcttgagcatatagatttatgaaaagttagatttattatataatgcgcataatgattaataatgaggaggcgttaataaaatgactgaaatagattttgatatagcaattatcggtgcaggtccagctggtatgactgctgcagtatacgcatcacgtgctaatttaaaaacagttatgattgaaagaggtattccaggcggtcaaatggctaatacagaagaagtagagaacttccctggtttcgaaatgattacaggtccagatttatctacaaaaatgtttgaacacgctaaaaagtttggtgcagtttatcaatatggagatattaaatctgtagaagataaaggcgaatataaagtgattaactttggtaacaaagaattaacagctaaagcggtcattattgctacaggtgcagaatacaagaaaattggagttcctggtgaacaagaacttggtggacgcggtgtaagttattgtgcagtatgtgatggtgcattctttaaaaataaacgcctattcgttatcggtggtggtgactcagcagtagaagagggaacattcttaactaaatttgctgacaaagtaacaatcgttcaccgtcgtgatgagttacgtgcacagcgtattttacaagatagagcattcaaaaatgataaaatcgactttatttggagtcatactttgaaatcaattaatgaaaaagacggcaaagtgggttctgtgacattaacgtctacaaaagatggttcagaagaaacacacgaggctgatggtgtattcatctatattggtatgaaaccattaacagcgccatttaaagacttaggtattacaaatgatgttggttatattgtgacaaaagatgatatgacaacatcagtaccaggtatttttgcagcaggagatgttcgcgacaaaggtttacgccaaattgtcactgctactggcgatggtagtattgcagcgcaaagtgcagcggaatatattgaacatttaaacgatcaagcttaattcgaagtcgaattaagatgttgagttgtaaattatttggatatttattttaatagtgtcatcacattgttaaaataatgtctttcttttaaattaaaacaaattatatagaaaactagaacttagcacgtatcatttgtgcgtttcaatgagttctagtttttttatatgttatattaaacttataactttatgggagtgggacagaaatgatatttttacaaaatttatttcgttgtcccgccccaacttgcattgtctgtagaatttcttttcgaaattctctgtgttggggcccctgactagagttgaaaaaaagcttgttgcaagcgcattttcattcagtcaactactagcaatataatattatggaccctaggacattgatttatgtcccaagctcctttaaatgatgtatatttttagaaatttaatctagacatagttaaaaataaatataaaacatcgttgcttaattttgtcatagaacatttaaattaacatcatgaaattcgttttggcggtgaaaaaataatggataataataaaaaagaaaaaagtaaaagtgaactattagttgtcacaggtttatctggtgcaggtaaatctttggttattcaatgtttagaagacatgggatatttttgtgtagataatctaccaccagtgttattgcctaaatttgtagagttgatggaacaaggaaatccatccttaagaaaagtggcaattgcaattgatttaagaggtaaggaactatttaattcattagttgcagtagtggataaagtcaaaagtgaaagtgacgtcatcattgatgttatgtttttagaagcaagtactgaaaaattaatttcaagatataaggaaacgcgtcgtgcacatcctttgatggaacaaggtaaaaaatcgttaatcaatgcaattaatgatgagcgagagcatttgtctcaaattagaagtatagctaattttgttatagatactacaaagttatcacctaaagaattaaaagaacgcattcgtcgatactatgaagatgaagagtttgaaacttttacaattaatgtcacaagtttcggttttaaacatgggattcagatggatgcagatttagtatttgatgtacgatttttaccaaatccatattatgtggtagatttaagacctttaacaggattagacaaagacgtttataattatgttatgaaatggaaagagacagagattttctttgaaaaattaactgatttgttagattttatgatacccgggtataaaaaagaagggaaatctcaattagtaattgccatcggttgtacgggtggacaacatagatctgtagcattagcagaacgactaggtaattatctaaatgaagtatttgaatataatgtttatgtgcatcatagggacgcacatattgaaagtggcgagaaaaaatgagacaaataaaagttgtacttatcggtggtggcactggcttatcagtcatggctaggggattaagagaattcccaattgatattacagcgattgtaacagttgctgataatggtgggagtacagggaaaatcagagatgaaatggatataccagcaccaggagacatcagaaatgtgattgcagctttaagtgattctgagtcagttttaagccaactttttcagtatcgttttgaagaaaatcaaattagcggtcactcgttaggtaatttattaatcgcaggtatgactaatattacgaatgatttcggacatgccattaaagcattaagtaaaattttaaatattaaaggtagagtcattccatctacaaatacaagtgtgcaattaaatgctgttatggaagatggagaaattgtttttggagaaacaaatattcccaaaaaacataaaaaaattgatcgtgtgtttttagaacctaacgatgtgcaaccaatggaagaagcaattgatgctttaagggaagcagatttaatcgttcttggaccagggtcattatatacgagcgttatttctaacttatgtgtcaatggtatttcagatgcgttaattcattctgatgcgcctaagctatatgtatctaatgtgatgacgcaacctggggaaacagatggttatagcgtgaaagatcatatcgacgcgattcatagacaagctggacaaccgtttattgattatgtcatttgtagtactcaaactttcaatcctcaagttttgaaaaaatatgaagaaaaacattctaaaccagttgaagttaataaggctgaacttgaaaaagaaagcataaatgtaaaaacatcttctaatttagttgaaatttctgaaaatcatttagtaagacataatactaaagtgttatcgacaatgatttatgacatagctttagaattaattagtactattcctttcgtaccaagtgataaacgtaaataatatagaacgtaatcatattatgatatgataatagagctgtgtaaaaaaatgaaaatagacagtggttctaaggtgaatcatgttttaaataagaaaggaatgactgtacgatgagctttgcatcagaaatgaaaaatgaattaactagaatagacgtcgatgaaatgaatgcaaaagcagagctcagtgcactgattcgaatgaatggtgcacttagtctttcaaatcaacaatttgttataaacgttcaaacggaaaatgcaacaacggcaagacgtatttattcgttgattaaacgtgtctttaatgtggaagttgaaatattagtccgtaaaaaaatgaaacttaaaaaaaataatatttatatttgtcgtacaaagatgaaagcgaaagaaattcttgatgaattaggaattttaaaagacggcatttttacgcatgaaattgatcattcaatgattcaagatgacgaaatgagacgcagttacttgagaggagcttttctggcaggtggctcagtgaataaccctgaaacatcttcgtaccatttggaaattttttctcaaaatgagagtcatgcagaaggcttaacaaaactaatgaatagttatgagttgaatgccaaacatttagagcgaaaaaaaggaagtattacgtatttaaaagaagcggaaaagatttcggattttcttagtttgataggtggctatcaagcgttattaaaatttgaagacgtacgtattgtaagagatatgcgtaattctgttaaccgactcgttaattgtgaaacggcaaatctaaataaaacagttagtgctgcgatgaaacaagttgagagcattaaattgattgataaagaaattggtattgaaaatttaccagacaggttgagggagattgctagaattcgagtagaacatcaagaaatttcgttgaaagagcttggagaaatggtgtcaactggtccaatttcaaaatcaggtgtaaatcatcgattaagaaaacttaatgatttagccgataagattagaaatggtgaacaaatagaattataagtaagaaggtgtttttggtagcgaattatcaaaaataccttttttatgattaaaaagtgtttaatgaataatagtcgactaactattaaattgatctggaaagtttaatgaaggaaattcaataaccaagcgttacctaattttctcattaagtagcatcatatatatcaatttggtcgtaagaaaatacgaatgtgataattaattgagtccctgaaagtccctgattatagacaaaaaaatcagcataaaaagaatcccgacattgcgggattctctgtattgaaaagtattgtattttatttaaatgcctccttgaagggaatcgaacccctatcttaagaaccggaatcttacgtgttatccattacaccacaaggagtaaatatgttaatcaaatcactgtactatcagaagtaaaataagtacaatctaaaatagatattatcagtttacaaaggaaagagacaagcgtcaatcaatgtaactatttaaagtcaaagtgtttgaccaaatttgacttaatatgtaaaataatgagtaacagttattacaaggaggaaatatagatgaatttaattcctacagttattgaaacaacaaatcgcggtgaacgtgcatacgatatatactcacgtttattaaaagaccgtattattatgttaggttcacaaattgatgacaacgtagcaaattcaatcgtatcacagttattattcttacaagcacaagactcagagaaagatatttatttatacattaattcaccaggtggaagtgtaacagctggttttgcgatttatgatacaattcaacacattaaacctgatgttcaaacaatttgtatcggtatggctgcatcaatgggatcattcttattagcagctggtgctaaaggtaaacgttttgcgttaccaaatgcagaagtaatgattcaccaaccattaggtggtgctcaaggacaagcaactgaaatcgaaattgctgcaaatcacattttaaaaacacgtgaaaaattaaaccgcattttatcagagcgtactggtcaaagtattgaaaaaatacaaaaagacacagatcgtgataacttcttaactgcagaagaagctaaagaatatggcttaattgatgaagtgatggtacctgaaacaaaataattcaaagtaaagagtagactaagcagtctgctctttttgtatgagtaaaccaaggtataaataaattgtcaaaaacatttcgattaaaagcaaaaaataacgggtaaaaatgtttatgagaatttaattagacacgttgcgtctgcggttcaacaatctaaaaaatataaaaggatgattttatgaaaggcattgaattacttaacaatccatttttaaacaaaggtacagcttttactaacgaagaaagaaaacagttagggcttgaaggtttattacctgcgaatgttcgaactttagaacaacaagcagaacaatgttatgaacaattcaaggcgaaacaaaccgattttgagaaacgtttatttttaatggcaatttttaatcgtaatcgtacattgttttacaaattgacttcagagcatttagttgaatttatgccaattatttatgaccctgttattgcacaatcgattgaacaatataatgagaatttcagcagaccgcaagatgcagtatttttatctgttgatagacaagaccaaattgaacaagaattgcgcaacgttgcaaatggcagagatattcgattaatcgtagtgacagatgcggaaggtatattaggtatcggcgattggggcgttgatggtgtagatattgcgataggaaaattaatagtatatacagcggcagctggaataaatccttcacaagtattacttgtatctttagatgtaggtactaataatgaacaattactgaaagatgacctttatttaggaaatcgtcataaacgtgtcgatgacgagacatattacgcatttgtagataaatttgtgagtgcagtgcgtaaagaatatcctaatgcactattacattgggaagattttggtagagggcatgccaaaaatattttagataaatatgaagatacgttaccgacttttaatgatgatattcaaggtacaggtatagttacattagctggcgtactaggtgcattaaatatttctaatgtagattatacgaatcagacgtttttagtttatggtggtggtacagctggtatgggtattaccaatattttaaaagatgaactaattaaacagggtgtttcagaagaaaaagcaaatcagcatttctatattatggataaacaaggattgttgtttgatgatatggatgatttaactgaagcgcaacaagtatttgctaaaaataggaatgaattttcaaatacagtaaactggaaaaatttaaaagaagtaattgaaaatattaagcctactgttttaatcggtacatcaactcaaacaggtgcatttacagaagatgcagtaaaagagatgttaaaacatacaaaacgtccaatgattttcccattgtctaatcctacaaaattagcagaagcaactgcacaagatttattaaaatggactaacggaaaagcattaattggaactggtatcccatataatgacattgaatacaatggtgtgaattacagtattggtcaagcaaataatgcattgatgtatcctggtttaggtttgggccttattgcgtcaaaagcgaagaaagtaaatcaacagattctatcagctgcgagtcatgcacttggtggcatggtcaatccagatgaaccaggtgctgcagtcttaccacctgtcgagaaaatacatcaatgttctcgtgccatagccaaagcggttgcacaaagtgtcattgatcaaggattaaacgctgaaactattgatgatattgacaaagcaattgaagctgaaatttggtatcctgaatacaaatcatacatttaattttataaagtagtaaaaggtcgtttgaacattttgtttcaagtggccttttcgtatttactttaaaattaatcaaccaatattcataagtgattttaaagttatatctatatgtaatatcggcaaatagaaaagtctagagagatttaacgaattatctcctagactttttgcttgaagtggagtaggagagatcaatgtctcactcacttactaattaaatcttcaagtgccatttttaaattactatatttaaattggaatcccaatgcttgaattttattaggtaatactttttgagtatccaatactactgttgacatttgaccgagtatgagacgcattgcaagacttggtgcccaagtttcatgaggcttatgcatagctcttgctaaagtgtagccaaataaattttgacgctcaggtataggtgcagttaaattaaacggaccactagctgactcgttatttattaaaaataaaatagcttgaattaaatcattgatatgaatccatgaataccattgttgaccagaacctaatttaccaccaatgtaatattcgtatggtagtttcattgtttgtaacgcaccgccttcattcgataaaatcataccgaaacgaccgatgacaactcgcgtacctaattgttcaaattgttgtgcgaaacgttcccattgatacacaatatctgataagaaatcaaatggtaaagttttataaacttctgtgtaactcataaataaatcagggggatagtaaccagtggcactagcattaaataaaactttaggtgctttattacgtgatttaaacaattcatataaagcttgtgtagattgaattctacttagcattagcgtttgtttatattccggtgtccatcgtttattcaatgtagcacctgctaagttgatgaccacatcgatattttggggaactttgtgttcccacccagatttagcccagttgacatatgaaattttcttatcatttgaaatttggtcgtgtcgcgttaatatcgtgatatgtgaatctgattttttgatttcattaactaattgagatccaaccataccagtcccaccagtaattaagtattgtttcattatcattcaccccatgtaattttgtatttagttactatttaataatcattattgttgttcaaaggttatacattatttagacaataatatgtcaataactttttttgaattgtattttaataaaaatgatataagttataataaaggtgtaccttcgataacgaataaacatctcttaaaagtatgtgtaaaacgctgcatgatacaaacgaaggtaaaaatttgactccctttagtagtggacccgtacgtttatcgtgcgggtcgtttttatttatttcttattcccattatacatcaattcaaagcattaattttttaaacaaatttaagaatacatagtaatataacaatctaaacataaaaacttttaacacaacacttaaagcaatgctttaattttcaatacgtagctataatttgttgtaaaatcaaaaaggttaaaatgttaattttcaaaaaaaggctcaaaatatgtttgatttagttattaaatgttaagatatataagactactatttctttgtaaaaatgaacccgatttacgagtgagtaatagtgaaggcagttttatgttgaagaaggcaaaaagagtatatgtttattgatatttgtagaaactaggtaagcaaattagttgtgaaaatgttaatggttgcgtgataatttctatatttaaattagtttgaagtgagggagagtatgtcgaatcaaaattacgactacaataaaaatgaagatggaagtaagaagaaaatgagtacaacagcgaaagtagttagcattgcgacggtattgctattactcggaggattagtatttgcgatttttgcatatgtagatcattcgaataaagctaaagaacgtatgttgaacgaacaaaagcaggaacaaaaagaaaagcgtcaaaaagaaaatgcagaaaaagagagaaagaaaaagcaacaagaggaaaaagagcagaatgagctagattcacaagcaaaccaatatcagcaattgccacagcagaatcaatatcaatatgtgccacctcagcaacaagcacctacaaagcaacgtcctgctaaagaagagaatgatgataaagcatcaaaggatgagtcgaaagataaggatgacaaagcatctcaagataaatcagatgataatcagaagaaaactgatgataataaacaaccagctcagcctaaaccacagccgcaacaaccaacaccaaagccaaataataatcaacaaaacaatcaatcgaatcaacaagcaaaaccacaagcaccacaacaaaatagccaatcaacaacaaataaacaaaataatgctaatgataagtagtatttagtcaaacaaaaatgaaccagtatgacagacaacacaattaattaggttgtctcgaatattggttcttatttttataattgttaattaagggagagatgatacttaaatagttagttgtttgttttgcggatagtgaaatttattttgagtgaggtgggacagaaatgatattttcgcaaaatttatttcgtcgtccaccccaacttgtgcattattgtaagctgactttccgtcagcttctgtgttggggcccaccccaacttgcattgcctgtagaatttcatttcgaaattcactatgttggggcccatccccaacttgcacattattgtaagctgactttccgtcagcttctgtgttggggcccaccccaacttgcacattattgtaagctgacttttcgtcagcttctgtgttggggcccaccccaacctccattgtcggtagaaattgggaatccaatttctctatgttggggcccctgactttaattggaaaagcttgttacaagcgcaattttgttcagtcaactactgccaatgtaacttttcggattttagagcattgatttatgtcctagtctcaaataataagcaaatgattagcgagtcagtataagggtatacatttgactacagtgaataaaataaaacgttttgttgtataacaaatcgaaaatatattgcaagcgctttatcaaattatttagaaaatttaagttttatgcttgcaatttttgaaatagaatagtactattgcaagtgtaaagaggttaatttttgtcccgcgcgggacttaaaaaggcaaccactggttgtgatatatccttatttacatttataaatataaggaggaggtagtagtgaaagacttattgcaagcacagcaaaagcttataccggatctcatagataaaatgtataaacgtttttctattcttactactatctcaaaaaatcagcctgtcggacgtcgaagtttaagcgaacatatggatatgactgaacgtgtactgcgttctgaaacagatatgcttaagaaacaagatttgataaaagttaagcctaccggaatggaaattacagctgaaggtgagcaactgatttcgcaattgaaaggttactttgatatctatgcagatgacaatcgtctgtcagaaggtattaagaataaatttcaaattaaggaagttcatgttgttcctggtgatgctgataatagtcaatctgttaaaacagaattaggtagacaagcaggtcaattacttgaaggcatattacaagaagatgcgatagttgctgtaactggcggatccacgatggcatgtgttagtgaagcaattcatttattaccatataatgtattcttcgtaccagccagaggtggactaggcgaaaatgttgtctttcaggcaaacacaattgcagccagtatggcacaacaagctggcggttattatacgacgatgtatgtacctgataatgtcagcgaaacaacatataacacattgttgttagagccatcagtcataaacactttagacaaaattaaacaagcaaacgttatattacatggcattggtgatgcgctgaagatggcgcatcgacgtcaatcacctgaaaaggtcattgaacaacttcaacatcatcaagctgtcggagaggcatttggttattattttgatacacaaggtcaaattgttcataaggttaaaacaattggacttcaattagaagaccttgaatcaaaagactttatttttgcagttgcaggaggcaaatcgaaaggtgaagcaattaaagcatacttgacgattgcacccaagaatacagtgttaatcactgatgaagccgcagcaaagataatacttgaataagagataaaaagtttaatactttttaaatatcattttaaaggaggccattataatggcagtaaaagtagcaattaatggttttggtagaattggtcgtttagcattcagaagaattcaagaagttgaaggtcttgaagttgtagcagtaaacgacttaacagatgacgacatgttagcgcatttattaaaatatgacactatgcaaggtcgtttcacaggtgaagtagaggtagttgatggtggtttccgcgtaaatggtaaagaagttaaatcattcagtgaaccagatgcaagcaaattaccttggaaagacttaaatatcgatgtagtattagaatgtactggtttctacactgataaagataaagcacaagctcatattgaagcaggcgctaaaaaagtattaatctcagcaccagctactggtgacttaaaaacaatcgtattcaacactaaccaccaagagttagacggttctgaaacagttgtttcaggtgcttcatgtactacaaactcattagcaccagttgctaaagttttaaacgatgactttggtttagttgaaggtttaatgactacaatacacgcttacacaggtgatcaaaatacacaagacgcacctcacagaaaaggtgacaaacgtcgtgctcgtgcagcagcagaaaacatcatccctaactcaacaggtgctgctaaagctatcggtaaagttattcctgaaatcgatggtaaattagatggtggtgcacaacgtgttcctgtagctacaggttcattaactgaattaacagtagtattagaaaaacaagacgtaacagttgaacaagttaacgaagctatgaaaaatgcttcaaacgaatcattcggttacactgaagacgaaatcgtttcttcagacgttgtaggtatgacttacggttcattattcgacgctacacaaactcgtgtaatgtcagttggcgaccgtcaattagttaaagttgcagcttggtatgataacgaaatgtcatatactgcacaattagttcgtacattagcatacttagctgaactttctaaataattttagtatagtttttattcaaatacgctagtgctcagaactatttagcattaattaaagcttatgagtaagcggggagcacaaacgcttctccgcttatttttatataaaatttcctaattacaaggaggaaacaccatggctaaaaaaattgtttctgatttagatcttaaaggtaaaacagtcctagtacgtgctgattttaacgtacctttaaaagacggtgaaattactaatgacaaccgtatcgttcaagctttacctacaattcaatacatcatcgaacaaggtggtaaaatcgtactattttcacatttaggtaaagtaaaagaagaaagtgataaagcaaaattaactttacgtccagttgctgaagacttatctaagaaattagataaagaagttgttttcgtaccggaaacacgcggcgaaaaacttgaagcagctattaaagaccttaaagaaggcgacgtattattagttgaaaatacacgttatgaagatttagacggtaaaaaagaatctaaaaatgatccagaattaggtaaatactgggcatctttaggtgatgtgtttgtaaatgatgcttttggtactgcgcatcgtgagcatgcatctaatgttggtatttctacacatttagaaactgcagctggattcttaatggataaagaaattaagtttatcggtggcgtagttaacgatccacataaaccagttgttgctattttaggtggagcaaaagtatctgacaaaattaatgtcatcaaaaacttagttaacatagctgataaaattatcatcggcggaggtatggcttatactttcttaaaagcgcaaggtaaagaaattggtatttcattattagaagaagataaaatcgacttcgcaaaagatttattagaaaatcatggtgataaaattgtattaccagtagacactaaagttgctaaagaattttctaatgatgccaaaattactgtagtaccatctgattcaattccagcagaccaagaaggtatggatattggaccaaacactgtaaaattatttgcagatgaattagaaggtgcgcacactgttgtatggaatggacctatgggtgtattcgagttcagtaactttgcacaaggtacaattggtgtatgtaaagcaattgcaaaccttaaagatgcaattacgattatcggtggcggtgattcagctgcagcagcaatctctttaggttttgaaaatgacttcactcatatttcaactggtggcggagcgtcattagagtacttagaaggtaaagaattgcctggtatcaaagcaatcaataataaataataaagtgataatttaaagtgatgtggcatgtttgtttaacattgttacgggaaaacagtcacaagatgacatcgtgtttcatcacttttcaaaaatatttacaaaacaaggagtgtctttaatgagaacaccaattatagctggtaactggaaaatgaacaaaacagtacaagaagcaaaagacttcgtcaatgcattgccaacattaccagattcaaaagaagtagattcagtaatttgtgcaccagcaattcaattagatgcattaactactgcagttaaagaaggaaaagcacaaggtttagaaatcggtgctcaaaatacgtatttcgaagataacggtgcgttcacaggtgaaacgtctccagttgcattagcagatttaggcgttaaatacgttgttatcggtcattctgaacgtcgtgaattattccacgaaacagatgaagaaattaacaaaaaagcgcatgctattttcaaacatggtatgacaccaattatttgtgttggtgaaacagacgaagagcgtgaaagtggtaaagctaacgatgttgtaggtgagcaagttaagaaagctgttgcaggtttatctgaagagcaacttaaatcagttgtaattgcttatgaaccaatctgggcaatcggaactggtaaatcatcaacatctgaagatgcgaatgaaatgtgtgcatttgtacgtcaaactattgctggcttatcaagcaaagaagtatcagaagcaactcgtattcaatatggtggtagtgttaaacctaacaacattaaagaatacatggcacaaactgatattgatggggcattagtaggtggcgcatcacttaaagttgaagatttcgtacaattgttagaaggtgcaaaataatcatggctaagaaaccaactgcgttaattattttagatggttttgcgaaccgcgaaagcgaacatggtaatgcggtaaaattagcaaacaagcctaattttgatcgttattacaacaaatatccaacgactcaaatcgaagcgagtggcttagatgttggactacctgaaggacaaatgggtaactcagaagttggtcatatgaatatcggtgcaggacgtatcgtttatcaaagtttaactcgaatcaataaatcaattgaagacggcgatttctttgaaaatcatgttttaaataatgcaattgcacacgtgaattcacatgattcagccttacacatctttggtttattgtctgacggtggtgtacacagtcattacaaacatttatttgctttattagaacttgctaaaaaacaaggtgttgaaaaagtttacgtacacgcatttttagatggtcgtgacgtagatcaaaaatccgctttgaaatacatcgaagagactgaagctaaattcaatgaattaggtattggtcaatttgcatctgtgtctggccgttattatgcaatggaccgtgacaaacgttgggaacgtgaagaaaaagcttacaatgctattcgtaactttgatgccccaacttatgcaactgccaaagaaggtgtggaagcaagttataatgaaggcttaactgacgaattcgtagtaccattcatcgttgagaatcaaaatgacggtgttaatgatggagatgcagtgatcttctataatttccgacctgatagagcagcacaattatcggaaatttttgcgaacagagcatttgaaggctttaaagttgaacaagttaaagatttattctatgcaacattcactaagtataatgacaatatcgatgcggttatcgttttcgaaaaagtcgatttaaataatacaattggtgaaattgcacaaaataacaatttaactcaattacgtattgcagaaactgaaaaatatcctcacgttacttactttatgagtggtggacgtaacgaggaatttataggtgaacgtcgtcgtttgattgattcacctaaagttgcaacgtatgacttgaaaccagaaatgagtgcttatgaagttaaagatgcattattagaagagttaaataaaggtgacttggacttaattattttaaactttgctaaccctgatatggttggacatagtggtatgcttgagccgacaatcaaagcaatcgaagcggttgatgaatgtttaggtgaagtcgttgataaaattttagacatggacggttatgcaattgttactgctgaccatggtaactctgatcaagtattgacggatgatgatcaaccaatgactacgcatacaacgaacccagtaccagtgattgtaacaaaagaaggcgttacacttagagaaactggtcgcttaggtgacttagcacctacattattagatttattaaatgtagaacaacctgaagacatgacaggtgaatctttaattaaacactaatattgtaaaagatgttaagtaaacgcttaatgacacttattttttgaaaataatagtaatatcattttgttaaatgaaagaataaagctataataattatagaataactatttaaaggagattataaacatgccaattattacagatgtttacgctcgcgaagtcttagactctcgtggtaacccaactgttgaagtagaagtattaactgaaagtggcgcatttggtcgtgcattagtaccatcaggtgcttcaactggtgaacacgaagctgttgaattacgtgatggagacaaatcacgttatttaggtaaaggtgttactaaagcagttgaaaacgttaatgaaatcatcgcaccagaaattattgaaggtgaattttcagtattagatcaagtatctattgataaaatgatgatcgcattagacggtactccaaacaaaggtaaattaggtgcaaatgctattttaggtgtatcaatcgcagtagcacgtgcagcagctgacttattaggtcaaccactttacaaatatttaggtggatttaatggtaagcagttaccagtaccaatgatgaacatcgttaatggtggttctcactcagatgctccaattgcattccaagaattcatgattttacctgtaggtgctacaacgttcaaagaatcattacgttggggtactgaaattttccacaacttaaaatcaattttaagcaaacgtggtttagaaactgcagtaggtgacgaaggtggtttcgctcctaaatttgaaggtactgaagatgctgttgaaacaattatccaagcaatcgaagcagctggttacaaaccaggtgaagaagtattcttaggatttgactgtgcatcatcagaattctatgaaaatggtgtatatgactacagtaagttcgaaggcgaacatggtgcaaaacgtacagctgcagaacaagttgactacttagaacaattagtagacaaatatcctatcattacaattgaagacggtatggacgaaaacgactgggatggttggaaacaacttacagaacgtatcggtgaccgtgtacaattagtaggtgacgatttattcgtaacaaacactgaaattttagcaaaaggtattgaaaacggaattggtaactctatcttaattaaagttaaccaaatcggtacattaactgaaacattcgatgcaatcgaaatggctcaaaaagctggttacacagcagtagtttctcaccgttcaggtgaaacagaagatacaacaattgctgatatcgctgtagctacaaacgctggtcaaattaaaactggttcattatcacgtactgaccgtattgctaaatacaatcaattattacgtatcgaagatgaattatttgaaactgctaaatatgacggtatcaaatcattctataacttagataaataatcattttaaacattaagtactgccataattttagttgaggattattatgtcggtataaattgaataaagtttttgagttcacgcttaaaaagttcacgcttgtatttataacctgccacagagttgagactgtggtaggttttttattttgaaatagtattcgtaacagactaataatcatgaggtaactaataacacatatttaacttgtattcttaaactggtataataaatttatgttgaaatgaatattgtatgacagggtattcacttttattaaaaggtaaaaattaaataaaggttttatagaacgtatttaaatatatgaggagtaaacaaatggctgatagaacgaataaagaaattaaaacaggacgctttattgcaactgcatcaatcgtattctcaatattgttgattattcattactttgtttcgttggataatgcgactgccaaagcattacttaatttaacgaatcaaaacacttcagataaagcgatagattacattttaaacagctttagattcactggtattatgtatattttggcttatctagcaggcttcatcactttttggaatcgacatacttatgtgtggtggtttatgtttgcagtttatgtatcaaatagtttgtttacgttgattaatttatcaatcacaattcaagcaataaaagctgcacacggtgcgtacttaacattgccaattttaattgttattataggttcggttgcattagcgatttatatgcttgttgtttctatcaaacgtaaaagtacatttaatcgctagaaaattgattttaacaataaaaatatgatatactacttgtcgtatataaggaacggaggacaatttatgcatacatttttaatcgtattattaatcattgattgtattgcattaataactgttgtactactccaagaaggtaaaagcagtggactttcaggtgccatcagtggtggtgctgagcagttattcggtaaacaaaaacaacgtggcgtcgatttattcttaaatagattaacaattattttatcaatattattttttgtacttatgatttgcataagttatcttggtatgtaaggtccggcgatgtaaatgtcgggcttttttatttataattagaaaaataaaggactcatgttcaattattagaaacatattgtttaattaagtacgtttgttaattgtgaaaaaggagcgttagatttatgcaaataaagttaccaaagcctttcttttttgaggaaggtaaacgtgccgtgttattactacatggttttacaggcaattcgtccgatgttcgtcaattaggtcgatttttacaaaagaaaggttatacatcgtatgcaccgcaatatgaaggtcatgcagcaccaccagaagagatacttcaatcaagcccttttgtttggtttaaagatgccttagatggctatgactaccttgttgaacaaggttatgatgaaatcgttgttgctggcttgtcattaggtggcgattttgcattaaaattaagcttaaatcgagatgtaaagggtattgtaacgatgtgtgctcctatgggtggcaaaactgaaggtgccatttatgaaggctttttagaatatgcacgcaattttaaaaagtatgagggtaaagatcaagaaacgattgataacgaaatgcatcatttcaaaccaactgaaactttaaaagaattaagtgaagcattagatacgattaaagatcaagttgatgaggtttttgacccaattttagtgattcaagcagaaaacgacaatatgattgatccacaatccgcaaattatatatatgaacatgtagactctgacgaaaaagatatcaaatggtatagtcagtcaggacatgttattacaattgataaagaaaaagaacaagttttcgatgatatttatcaatttttagagtcattagactggtcagaataaaaagagattttaacattagaaaggaggggcataatgaatttaaagcaatcaatagaagagattattaatcaacctgaatatgaacctatgtcagtttcagattttcaagatgcattaggtttaagcagtgccgactcatttagagatttaattaaggtgcttgtggaattagaacaatcaggattaatcgaacgttcgaaaacagatagataccaaaaaaagcatagttctaaaggtcaatcgaaattaattaaaggaacattaagtcaaaacaagaaaggttttgctttcctaagacctgaagacaaagatatggaagatatatttattcccccaacaaaaattaatcgtgccttggatggagatactgttattgtagaaatccatcaatcaaaaggtgagcataaaggtaaaattgaaggggaagttaagtcaattgagaagcattcagtaactcaagtggttggtacgtatagtcaggctagacattttggttttgtcattccagatgataaacgaattatgcaagatattttcattcctaaaggacaaagcttaggtgcagtagatggtcacaaagtattagttcaaattactaagtatgctgacggttcagataatccagaaggacatatttctgctattttaggacataaaaatgatcctggcgtagatattttatctattatctatcaacatggcatagaaattgaatttcctgatgaagtgttacaagaagctgaagcaacaccagacaatatagaagatagtgaaattaaaggacgtcatgatttacgtgatgaattgaccatcactattgatggcgcggatgccaaagacttagatgacgcaattagtgttaaaaagttagcgaacggtaatacgcaattaactgtaagtattgctgatgtcagctattatgtaacagaaggttctgcattggataaagaggcttatgatagagctacaagtgtatatcttgttgaccgtgtaattccaatgattccacatcgattaagtaatggtatttgttcattaaatcctaatgttgatcgtttaactttaagctgtcgcatggaaatcgatgatagtggtcgcgttgtaaaacatgaaatctttgatagtgtgattcattctgattatcgaatgacgtatgatgcggtaaatcagattattactgaaaaggatcctacgattcgagagcagtataatgaaattacgcctatgctagatttagcacaagatttatcaaatcgtttaattcaaatgagaaaacgccgtggtgaaattgattttgatattagcgaagcgaaagtactagttaacgaagatggtatacctacagatgttctattgagacaacgtggtgaaggtgaacgtcttattgagtcatttatgttaattgcaaatgaaacagttgctgaacattttagtaagttagatgtaccatttatttaccgagtgcatgagcaacctaaatcagatcgcttaagacaattctttgattttattacaaactttggcatcatgattaagggtactggcgaagatattcatccaacaacacttcaaaaggttcaagaagaagtagaaggtcgacctgaacaaatggtcatttcaacaatgatgttacgttcaatgcaacaagcgcattatgatgatgtgaacttgggacattttggcttatcagctgaatattatacgcattttacatcaccaattagacgttatcctgatttaacagttcatcgtttaatccgtaagtatttaattgagaaatcaatggataacaaagaagtgaagcgttgggaagacaaattgcctgagttagctgaacatacttctaaacgtgaacgtcgtgctattgaggcagaacgtgacactgatgaattgaaaaaagcagaatatatgattcaacatattggtgatgaatttgaaggtattgtcagctcagtagctaacttcggtatgttcattgaattgccaaatacgatagaaggtatggttcatattgcgaatatgactgacgattattaccgttttgaagagcgtcaaatggcattaattggtgagcgtcaagctaaagtatttagaattggtgacacagttaaggttaaagtgacgcatgttgatgtagatgaacgattaattgattttcaaattgtaggtatgcctttaccgaaaaatgatcgatcacagcgcccagcgcgaggtaagacaattcaagctaaaacgcgtggtaaatcattagataaatcgaaatctgatgataaaggtcataagaaaaaaggtaagcaacgtaaaggtaaaaatgaacgtaaaaatgacaaatcaggaaacagtaaacataagccattttataaagataaaagtgtgaaaaagaaagcacgtcgtaagaaaaaataagcagcaatgaggtgagtataaatggctaagaagaaatcaccaggtacattagcggaaaaccgtaaagctagacatgattataatattgaagacacgattgaagcgggaattgtgttgcaaggcacagaaataaaatcaattcgccgaggtagtgctaaccttaaagatagttatgcgcaagttaaaaacggtgaaatgtatttgaataatatgcatatagcaccatacgaagaagggaatcgttttaatcacgatcctcttcgttctcgaaaattattattgcataagcgtgaaatcattaaattgggtgatcaaacacgtgagattggttattcgattgtgccgttaaagctttatttgaagcatggacattgtaaagtattacttggtgttgcacgaggtaagaaaaaatatgataaacgtcaagctttgaaagaaaaagcagtcaaacgagatgttgcgcgcgatatgaaagtccgttattaagcgatttagttgcttaatcgggctatatttgatatagttatatgtgcttttgtaaattacaaaagtatgatttgtttgatttattatttcgggggcgtttctggattcgacaggggtcccccgagctcattaagcgtgtcggagggttgtcttcgtcatcaacacacacagtttataataactggcaaaacaaacaataatttcgcagtagctgcctaatcgcactctgcatcgcctaacagcatttcctatgtgctgttaacgcgattcaaccttaataggatatgctaaacactgccgtttgaagtctgtttagaagaaacttaatcaagctagcatcatgttggttgtttatcacttttcatgatgcgaaacctttcgataaactacacacgtagaaagatgtgtatcaggacctctggacgcgggttcaaatcccgccgtctccatttagatagcctgcagccattgtggttgtgggcttttttattatgtgtttttcaggggataatgcattgtagaaatagttgtgagtattgaaatagcagtgtttgtataggtgtttatttgatggaggaaagagtaataagtgattatgaattagtttttgagatataaggggaaagggatgtgtgtcatataagtgtcaaaaaagttggattctgagttttacattcaacattgttcatgaagaaacttctttatacgcaaaaaaattctccatgttatatatgtcaatttaaaaatgtacataaatgattgtataggaatgtacaaaattgattgctaattaatttccttcttaggtgaaagatttttaaatctatacgacttatctgtgattttagctacgcttgaatgaatcgtctacacataattggataaatggctactgaaaaagaacttttcatttttgttacgtcactaagtgggtgtagttataaagagataagccgagttttgatattttcattagaatcaatatgcctattaacacaatcagcaatagttgacgagacgaaaataaaagaagtcgtagttaagaaaagcatttcacaacataccattgtagccatttttattgttttggatgataaactctttttggaatttttagtttttataatttgcaactacactacttcttttactaatattaatgtctaagtaatcgataaaaaattctccattgaataaatgagaagttaaaaactatacttaacctttctcattgcattttcctattcacgattttaagaacccaacatactacaaacgaattttaaaaggcgagagtaaagcttacttgtttattatacggatttaaaatccaagagtctgaacaggctactcctctttataactataaaaatagctatgaaaaaatctatcgtcatagattccttcatagctaatcttagtatgtttattttaggatgctatttatcaaatcaacatataactcactatttttataaccttctaatatatcattaacttgtctaataggtatttctggtacttctctaatgttttccaattttgttttaaattgtttttttgttatttgctctttatttgtagccaattggaacaagtaagaatctagcatattaatttctttatatgaatacatatatcttaataacactaaatctctagtttttaagttaggcgctagttcttcttgtaattgttctattgattgtttcattaataacaatctcatttctaattcttcattattcattttatcacactctttttatattaatgcttggccaacctgagaaacccaaaaccctatgcttcttgcagttgagtctttaataccagctcccatcaatgcttgtgaaacttgtccttgtacatttccccatgtaacctcttcttgttttaatacattattcaatgcgggatttacaaatttatctcatctttttttaaatgattttccggcacggggactgatttctttaacactattaaacacagattttttatttttaatcatagctttatagtatcatgttggctaagctataaataagtcagtttctctaaaaattaaataactgaatgcgagcattcataaatttatacttcatctaaactactgtggtcgtcatctttttgcttttctttttctttctctcgttcttgttcttttttgtactcttcttcaaattctttttctttcttttctacttcttctcttgtttccgctctatgagaaaaatcttcggttttaagtttactaaatttgaatgatttagaatcaactgttttatcttctgagtatttatggacatttaaattaatatttccatcacctcttaactcatagatgaacatggcttgtgcagttttgccttttttaatttgatcttggttatgttctgtccaatctttatattttttatcacttaaaagataaccatctcttaatttatttactgtatttttatcatcttgagtgatattaatatagtcatgagaaatagaagatggatttaaatctttatcgtcttttttagcagtaatttccattttaaaagcgatatatttctttttctcatctttttcattgatgataaacggttcttttattttagcttcaaatttgtcactaacaatagtatcgcctttaatttttatatccatattttttttgcttttaaattctttaagttcttcatttaattcttcattgtcattttctttctttttgtgactagtgctctctttttttgcactatcttgatgatgtccacaagcacctaagataagtgtacttgctaataatatccccattacttttttcatttaacatgtctcctttatttcgcaaaaatttattttaaaaactctaaatgacttatcattttgagtaattaaacaaagttgatattttgtgagattctaagatgatattaaataattcttgtaataatgattctatgtattgttgcaataaattaatgaaactataattactaatattatattacttttattgatagaaatatattacttttttaaaaaacttgtaatatattgaaagatttaaatgtaaaattttgatttgttaagaaattgtgtttataaaaataaaaaaatcaacttatttgtatgagatgaatatgtattgaagaagatgtgttattaatttggaaaatactggtcaaaggtgggagctctcaaaagcgttattgtattttttagtcaatgcaaatagattgccgtaataataagcgtacctgatggttaaaaaaattatttaaggctataaagcaaaactttttatatgagcagtcgaatataacgtttaaaatgattctttttggatataaacgattaagtaaaatgatttttcagtttgaaattaatcatataaatttcttaagggaagagtgatatcttaatgattaatattatttcagctataggatctattggaacatttattatggctttattttattttgtatcagtttcagttcaactttatcaaatgaaaattagctttctgccagctttaggttttaaccaaattttattagaaagggagggggatcaacttaatataatgaattcggcaacagaagagcatcatcataaagattatattaaactatataatttaggtggcggtgctgctaaaaaaattgcaatagaggttttattgggtaatgataaagtcatacagaaaaaatacgtgaatattttacctagtaaagaagggtacatgttaccaattaataaaaatgtgtacgaagaattagaaagaacgattgagaacaatggttatgaagctgatttgaatgtacgtatgacttattatcataatgtaagtcgcaaacaacaagaagttatattaaaaggtcaaatcgaccgttttaatacttataataataaagaaatttatgatttgcagtttatctaaaaattgatttaagagggtagttgtttattgcgaaaaatatcattcaattttaatgaaataatggcgtcattactataaaatattactttatgttgtaatgcatttttctataagatagaactaaaaggaggggcaaagatgcaaattagacaaatacatcaacatgactttgctcaagttgaccagttaattagaacggcatttgaaaatagtgaacatggttatggtaatgaatcagaactagtagaccaaattcgtctaagtgatacgtatgacaataacttagaattagtagctgttcttcaaaatgaagttgtagggcacggtttactaagtgaagtttatcttgataacgaggcacaacgggaaattggattagtgttagcacctgtatctgttgatattcatcatcaaaataaaggtatcgggaagcgattgattcaagcattagaacgagaagcaatattaaaaggatataattttatcagtgtattaggatggccgacgtattatgccaatctaggataccaacgcgcaagtatgtacgacatttatccaccatatgatgggataccagatgaagcgtttttaattaaagaattaaaattgaacagtttagcgggaaaaacaggtaccataaattacacatctgcttttgaaaaaatatgattgcaagctaggattacattaggcagagttcatattaataatacaaattgttctcaatgaaatcgtgtgttgtcgtttgtaaatttttaaaatagcaataaataaaatgtttgttagtaaagtattattgcagataataaaatatcgatacaaattaattgctgtaatgcaattttagtgtataattgcattaatggagattaaatatatctttaaagggtatacagttaatataaaatgattttttaaaaagagggaataaaatgaatatgaagaaaaaagaaaaacacgcaattcggaaaaaatcgattggcgtggcttcagtgcttgtaggtacgttaatcggttttggactactcagcagtaaagaagcagatgcaagtgaaaatagtgttacgcaatctgatagcgcaagtaacgaaagcaaaagtaatgattcaagtagcgttaatgctgcacctaaaacagacaacgcaaacttgagtgatactaaaacaacgtcaaactctaataatggcgaaacgagtgtggcgcaaaatccagcacaacaggaaacgacacaatcagcatcaacaaatgcaactacggaagaaacgccggcaactggtgaagctactactacggcaacgaatcaagctaatacaccggcaacaactcaatcaagcaatacaaatgcggaggaattagtgaatcaaacaagtaatgaaacgacttctaatgatactaatacagtatcatctgtaaattcacctcaaaattctacaaatgcggaaaatgtttcaacaacgcaagatacttcaacagaagcaacaccttcaaacaatgaatcagctccacagagtacagatgcaagtaataaagatgtagttaatcaagcggttaatacaagtgcgcctagaatgagagcatttagtttagcggctgtagctgcagatgcaccggcagctggcaaagatattacgaatcagttgacgaatgtgacagttggtattgactctggagatacagtttatccgcaccaagcaggctatgtcaaactgaattatgggttctcagtaccaaatgaggctgttcaaggtgacacattcaaaataactgtacctaaagaattaaacttaaatggtgtaacttcaactgcgaaagtgccaccaattatggctggagataaagtattggcaaatggtgtaatcgatagtgatggtaatgttatttatacatttacagactatgttgatactaaagaaaatgtaacagctaatattactatgcccgcttatattgaccctgaaaatgttaaaaagacaggtaatgtgacattggctactggcataggtagtacaacagcaaacaaaacagtattagtagattatgaaaaatatggtaagttttataacttatctattaaaggtacaattgaccaaatcgataaaacaaataatacgtatcgtcagacaatttatgtcaatccaagtggagataacgttattgcgccggttttaacaggtaatttaaaaccaaatacggatagtaatgcattaatagatcagcaaaatacaagtattaaagtatataaagtagataatgcagctgatttatctgaaagttactttgtgaatccagaaaactttgaggatgtcactgatagtgtgaatattacattcccaaatccaaatcaatataaagtagagtttaatacgcctgatgatcaaattacaacaccgtatattgtagttgttaatggtcatattgatccgaatagcaaaggtgatttagctttacgttcaactttatatgggtataactcgaatataatttggcgctctatgtcatgggacaacgaagtagcatttaataacggatcaggttctggtgacggtatcgataaacctgttgttcctgaacaacctgatgagcctggtgaaattgaaccaattccagaggattcagattcagacccaggttcagatagcggttcagattcgggtagtgattcagattcagcaagcgattccgattcagatagcggttcagattcgggtagtgattcagattcagcaagtgattcagattcagcaagcgattccgattcagcaagtgattcagattcgggtagtgattcagattcagcaagcgattccgattcagcaagtgattcagattcgggtagtgattcagattccgatagcgattccgactcagacagtgactcagactcagaaagtgactcaaattccgatagcgattccgactcagacagtgactcagactcagaaagtgactcaaattccgatagcgattccgactcagacagcgactcagattcagatagtgattcagattcagacagtgattccgactcagacagcgattcagattccgatagcgattccgactcagatagcgattccgactcagacagtgactcagactcagacagcgactcagacagcgattcagattccgatagtgactcagactcagatagcgattcagattcagcgagtgattccgactccgatagcgactcagactcagatagcgactcagactcagacagcgattcagactcagacagtgactcggattcagcgagtgattccgactcaggtagtgcctcagattccgacagtgattccgactcagatagcgattcagattcagcaagtgattccgactcagacagtgattcggattcagatagcgattcagaatcagatagtgattcagattccgacagcgactcagattcagcgagtgattcagactcaggtagtgcctctgattcagatagtgactcggattcagcgagtgattcagactcaggtagtgactcagattcagcaagtgattccgactcagacagtgattcggattcagacagcgattcggattcagcgagtgattccgattctgattcaacgagtgacaaagaatcagacaatgactccgactcaggttctaacaataatgtagttccgcctaattcacctaaaaatggtactaatgcttctaataaaaatgaggctaaagatagtaaagagccattaccagatacaggttctgaaggtgaagcgaatacgtcactaatttggggattattagcatcattaggttcattactacttttcagaagaaaaaaagaaaataaagataagaaataagtaataatgatattaaattaatcatatgattcatgaagaagccacctaaaaaggtggcttttttacttgggttttccaaatatattgtttgaatataattaataattaattcatcaacagttaattattttaaaaaggtagatgttatataatttggcttggcgaaaaaatagggtgtaaggtaggttgttaattagggaaaattaaggagaaaatacagttgaaaaataaattgctagttttatcattgggagcattatgtgtatcacaaatttgggaatacaatcacgcgagtgcagtggtttctggggagaagaatccatataaatctgagtcattgaagttaactgggaaaagaagtaatagcgttacaccagtaatgtataaagaaaatttggagaaactaattgcatcattatcatttgcagattatgagaaatactatgaaccagagtacaaagaagccgttaaaacttatcaacagaaatttatggcagaagatgcagcattaaaaaagttttttagagaagagaagcatattaaagaaaatacaaatactaatgaaatgttaggacttactgaagaaagatatcaacatatatacgataaattaaaatctaataatgaatggtttatgaaagagataaaaaatattcaagaacgttatcaggatttaaaagattttgatgaaaaacaacaacatgatgcagatgtaaaaatcaatgagttggaaaataaagttttgatgttgggatatacttttggaaatgttggaggagcaagaacgaatttatatagtaaattagatttaattttaggatatgaagattacgaaagaaaatataaacagcctactaattcaagaatgctaaatgaaaaaatggaagatttagaaactattattgatgagttttttgaggaaattggaaagcaacgaccgataaatattcctacattagcatctgaaaaagaaaaagaaacaaatgcaaaaaatgcaaataagttaagagctgatactgaagatgctataaatgatgaaaacaagagatgtaatcgaagtaaaagaagtttaaatactcaaaatcacaaacctgcatctcaagaagtctctgagaaacaaaaagctgactacgaaagaaaagctgaagaaagaaaagcaagatttttagataagcaaaaaaataagcaaacgcctgtagtgtcattagaatatgattttgaacataaacaacgtgttgacaacgcaaacgacaagcaacttgtggtttctgcaccaacaaagaaaccaacatcaccgacttcatatactgaaacaacgacacaggtaccaatgcctacagttgagcgtcaaactcagcaacaaatcgtttacaaagcaccaaaacaattggctggattaaatggtgaaagtcatgatttcacaacaacgcatcaatcaccaacaacttcaaataacacgcataatcatcttattgaatttgaagaaacgtctgctttacctggtagaaaatcaggatcactggttggtataagtcaaattgattcttctcatctaactgaacgtgagaagcgtgtaattaagcgtgaacacgttagagaagctcaaaagttagttgataattataaagatacacatagttataaagaccgattaaatgcacaacaaaaagtaaatactttaagtgaaggtcatcaaaaacgttttaataaacaaatcgataaagtatataatggcaaataatgagtttgccgtaaaaataacaacattttaaactagcaataaataatatcaaagtcatcatttcaatgatgcaatctagtatagtccacattctaaacaggtgtggactattacttttttcactttatattacgaaaaaattattatgcttaactatcaatatcaataattaattttaagctgaaaaacaataaaaatgttaagacaacgtttacttcaagttaattattatactgaaaattctggtatataatgctgttagtgaatataacaggaaaattaaattggttataatattgagtctatataaaggagaaataacagatgaaaaagaaattattagttttaactatgagcacgctatttgctacacaacttatcaattcaaatcacgctaatgcatcagtgacagagagtgttgacaaaaaatttgtagttccagaatcaggaattaataaaattattccaacttacaatgaatttaaaaaagcaccaaaagtaaatgttagtaatttaactgacaacaaaaactttgtagcttctgaagacaaattgaaaaagatttcggatccttcagcagcaagtaaaattgtagataaaaactttgtcgtaccagaatcaaagttaggaaacattgtaccagagtacaaagaaattaataatcgcgtgaatgtagcaacaaacaatccagcttcacaacaagttgataagcattttgttgctaaaggcccagaagtaaatagatttattacgcaaaacaaagtaaaccaccacttcattactacgcaaacccactacaagaaagttattacttcatacaaatcaacacatgtacataaacatgtaaatcatgcaacggattctattaataaacactttattgttaaaccatcagaagcacctagatatacacacccatctcaatctctaatgataaatcattattttgcagtgcctggatatcacgcgcataaattcgtaacaccagggcatgctagcattaaaattaatcacttttgtgttgtgccacaaataaatagtttcaaggtaattccaccatatggtcacaattcacatcgtatgcatgtaccaagtttccaaaataatacaacagcaacacatcaaaatgctaaagtaaataaagcatatgactataaatacttctattcttataaagtagttaaaggtgtgaagaaatatttctcattttcacaatcaaatggttataaaattggaaaaccatcattaaatatcaaaaatgtaaattatcaatatgctgttccaagttatagccctacacactacgttcctgaatttaagggtagcttaccagcaccacgagtataaatattggcactaagtttacgagatatgataaatacctattattttaaatatagtctacaatctatgtggttgtaggctgtatttttttacgctaagtgatatacatctatcaacaaattattttgcttttctactttgaaagttgaatagtaacataatattaaataattattttattaattaatataaatataagactcgaaataatagttaatagtttgtttatcgcaagttaattattgtttctaaaatattggtatataattttcaatggcgaagaaaacagggtaaaaaagtcggtttttaaatcaaagcaaataagggagcataaacaaatgaaaaggaaagtactagtactaacaatgggtataatttgtgcaactcaattatggcattctaatcacgtaaacgcattagtgacagagagtggcgcaaatgatactaagcaatttactgaaattgtatcggaagagaaagttataacagttgaacatgctcaaataaataattttaaatctaatagcaattcaaacctgatggagttcaacatattaacaatgggcggtaaatcaggagctatggttggttatagtgaaattgactcatcacatttcacagaccgtgacaaacgcgttattagacgtgatcatgttaaagaagcacaaagctcttagtagagaactataaagatacacaaagtgctgatgctaggatgaaagccaaacaaaaagttaacactttaagcaaatcgcatcaaaactatttcaataaacaaattgataaggtatataatggattacaacgctaatccaaagtaaattataagttatacatctcgtttttaaatgacaatttatccccgtaaatattataaataatcttttcaaattccacatagatatagagacactaataaacctctttgtctcgatatgatagtctgcaacgattcatgttgtaggctttttaattttacaaataaggctaaatatataagttctgacacctaaaatatagaaaatacataaaagtaagtatagttattttattataattattaaatttttattaattaattgtaaaaatgtagaattataattaattaacgtttaatattaaaattaactaaaaagaaagaggtgttagttatgacagaatacttattaagtgctggcatatgtatggcaattgtttcaatattacttatagggatggctatcagtaatgtttcgaaagggcaatacgcaaagaggtttttctttttcgctactagttgcttagtgttaactttagttgtagtttcaagtttaagtagctcagcaaatgcatcacaaacagataacggcgtaaatagaagtggttctgaagatccaacagtatatagtgcaacttcaactaaaaaattacataaagaacctgcgacattaattaaagcgattgatggtgatacggttaaattaatgtacaaaggtcaaccaatgacatttagactattattggttgatacacctgaaacaaagcatcctaaaaaaggtgtagagaaatatggtcctgaagcaagtgcatttacgaaaaaaatggtagaaaatgcaaagaaaattgaagtcgagtttgacaaaggtcaaagaactgataaatatggacgtggcttagcgtatatttatgctgatggaaaaatggtaaacgaagctttagttcgtcaaggcttggctaaagttgcttatgtttacaaacctaacaatacacatgaacaacttttaagaaaaagtgaagcacaagcgaaaaaagagaaattaaatatttggagcgaagacaacgctgattcaggtcaataatgctcattgtaaaagtgtcactgctgctagtggcacttttataatttttagatcacaatatgatttattatccattcagaattaaaaaagtaaatagtatcaaaagcaagtgtatttaatattagaaaataaaaattttaaatttagtattaaaatgaaatattactatatatttcaatgtgtattatcacagaaaataaaataatgctttacttctatatttaaaagtgtataatgaaagttaagtaataaagagcgtgaagaaaaatgtgagttatttatatagaatattctccttttcatttatgaatttgttacaaaatatttagtgcaaaagcacgacggaggtattcaatatgaataacggtacagttaaatggtttaatgcagaaaaaggttttggtttcatcgaaagagaagatggtagcgacgtattcgtacacttctcagcaattgctgaagatggatataaatcattagaagaaggccaaaaagttgaattcgacatcgttgaaggcgaccgtggcgagcaagctgcaaacgtagttaaaatgtaattttaacttattcaaacagtccttattatagggctgtttttttatgctttaaatcgatagcagttggtgtggtaaaagcactagctgttatttttttgtccaataaatttaggtggagatctaacaatatataatggttctataataaatcggactgatggaaaagctttttacttttcatctgtccgattttttgattttgaatataaaaaaagcgccaatacagaactttaataatgacgagaattaaagtctgtatatggcgataacaagaagtaatgttaaacactcaaaatgtttaacaataataggataccacatcgcataatatcttactacttaattaataatttaactaatcaactttttgttaattttttattaagactgattaattattgagaatatttattgtttttaaaatctcataataattcagtaatcttgttttcatttaaaaggcgaaacattaaaataattaaataaaaatattgcgtttaatttacagcgtcaaatatacttatttctaatgctttggggtctactgaaacaagtagagaatgatcgatgttgctaatattgccattctccaaatctatttctgtgagtatttggaagctaccattaggcaacggtttaacaatagacaattgcttttccgcttgttgtattaaaaaaggttttgtagattgattattaatatgccattcgctcatgtaggtttttcactcctgctttaaaatagggtttagaaagtttatagttgagacattcatgttcaaccaaaattttgttcaaattcaataaatgtcttgtttaaaatagaaatattgtatatgttatcgtccaaaacttcaccagttaagtatttgttttgaattaaaatttggcagttagttaagaagtcttgataatcacgatcgcaaaaatagttttcacgtgcatctttagcatcgccaaaaaagttagcgactgtttctgtttctccattattcgaacgttcaatatataatttgtaaaatttagctattgtatacttttgttctttagttagttcattcaaaatattgagcctcctgaaataccatttgtaatctatacccaatttattgcaaaacacaaactaatttaactatttgatgaaacagttttaataagctttaacaagccttagtttatatggatctataaaattatctttaattgcatagggtgaaataatatgtagtccataacttttaactgatttttcacttacaccaaatttataagcttgatagataattttagtacaatacgtaaattttttgctgttcaaatttaatgtaactagataacgatgatttgtattttcatagtttttcttaacccagtcagccgcttttttacctgcaccaggatagctgcaacgataaactttcatccaatcatttttgccacttgcataattatatttaaaagattcgaaggattgtgtagttggtttgtcgccaggcccctcaatttgtaaaatcgttttattatcaatcgcgatactacaatgaccaaaaaatccccacatgacagggccttttgtaataataatatcaccaggttgtaattggaatttgtcatcttgaatttctgaatacttattatctgcaattgtttttggtgagtttataggggatacgacaacgaataatataagtaaaattatcgttcgtttaatatagttcacttaaaagctccttgttgaagaaatatatgtaaatagtcttaaattagaattgtaatctttaataagcttgtaagactaaaacatatcttaaatattaaagtatgagagtgtgaaatgtctattaagaataaaaaacagtctaaaacatctttgagacgtttcagactggatataaattgaatttcatttatagcacaccaaatataaatgtgtatattaatatagcgaatccgaatatatagagaatgacagtgaaacttaaataggactcttttttagattctttgccagtttttttcattaatacgagtataaacgtagcggcaactaagaaaattaatgctagccaaaaaagaattgcaaaatgtaaagacatgtgaaaccctccttatataccgtaattattaacctataaaactataaaaaataggataaatgtaatagagaacgagtacgatatttataaaaaataatatttcacttaaccagtttttagttatcattgcaatggtaaaggatacgatgagtatcacaccacaaatgataataccaggcaggagccaacataaatcatctaaatctttattatatgtgattaaaatattaaagataacaaaagtggtagtaataactatattgatagcatttaacaaaatgttattcatgactgacacctactagtataaaaatagcttcttaataaatatgataacactattttccaataggtaaataaaaagtatagttatttttaaaatattatttgtagaatgctaaagtttattaattcaaacaagtgagcatatataggggtgtatagtattaatgtgaaaagaatatttacatactaaaaacccttaaagttgtacaattcgttaatatttttagaatcagataacaaaaaaatgtgcaaaatcacttttgcacatttacaaatactagttttctgataagattaataataacactttaaatagcgcttaataaagaagggggcaaatcttatgacgttttacaatttcatcatgggttttcaaaatgataacactccatttggtatattggccgaacacgttagtgaagataaagcattccctcgattagaagaaagacaccaagtaattagagcatatgtgatgtctaattacacagatcatcaattaattgaaactacaaatagagctattagcttatatatggcaaattaatttgagtagtaccaattatgatgtattagtgcatcccaaatatcttttgttttaaagtttatttcatcatttcttatcgaaaatggtgtaataatgtctttatctaaccaagtgtttataagttcatttggtacaccatctaacaacatttcacttttactaattataaaacattcccagtcaagtgaaacattttgtggattcacataattacattgattatgattatccataaatactcactcctttaaaattctgtactcttcattgcgttttaccccgtcacattatcttttaaactaaaatcatcattacttatgaaaaaaatgtacatcaaaagcaaaggttttcgctaccgaaaaagtttaaataatggtttaatatatttggtactcattttaataaaaagagaatacattttgagctatcaatactttttattgaagaggtgttattgttggctaaaacgttatatttgatgcgccacggacaaactttgtttaattttaagggactaattcagggatttggagattcgccgctaacagaacttggaattgctcaagctcaaaaggcacgtagttattatgaaactaaggggataaacttcgatttatatgcatcatcaacgcaagaacgcgcaagtgacacacttgaaaatgttgcacctaaccaatcgtatcaacgttttaagggactgaaggaatggcattttggattatttgaaggtgagtcagtctatctatttgataatctatacaagcctgaggacttattcggagatcgaattgttcctttcaaaggagaggcaaggcaacaagttgaagatcgcattgtgaaaactttacatgacattatgtctcaaacaaagaataatgcattagtcgtgagtcatggaacaataatgggagtatttttaagatattgccttaaactagatgaagcattaaagcataatatcggtaattgtaatatcctgaaatttgaatatgacaatggaacatttaaatttgttgagttaattgatccaaatttataataaataaagcgttatacatagacacaagtatgtcttttgtataacgcttttaaaatacaactatataaagctttagaatattaactgaataagtttttgtaatatcatcagagcgacaataataattattatacttgatattttattgattattgttaataattttccggttttatcaattgatccaaccatttttcctaaaattgcgagcaaaaagaaccataaccatgaaacgctaatacaagcgattgtaaacgcaattttattgctgccactatataatgcagcactactaccaattacaccaattgtatctaaaatagcatgtggattgagtagtgaaactgataaagcaaaacttacttgtttcattggagacataatttgatcttctccatctgttgagggtttatcatgccaaatggtccaagccatatacatcaagaaaattaaaccaactatataaataattgcttgaagtacaggtaaagacataataatgatagatactcctaccactgcaataataataagtaagctgtctgacaacccggctgtaattattgcaggcaatacatatctatattttggttgattagctccttggttaaaaataaatacattttgtgcacctaaaggtaaaattagaccaatcgctaagataaatccatgaataattgcggttaccattaagttttgacacccctaaaacatagaatattctgaaaaaacttattgatatcatatcaaataaaaagagcctgagacataaatcaatgttcaatgctctacaaagttatattggcagtagttgactgaacgaaaatacgcttgtaacaagcttttttcaattctagtcaaccttgccggggtgggacgacgaaataaatttttcaaaaatatcatttctgtcccactcccatgaaaaatagattaatatatgatttgaatttatgagaaatgtagaatatataaaactgtattacttattaatcaaatcataaaatagccaatgttcatcgaaataggtatttccgattttaattgcatttttctcaaaaccaagaatgtcgaatcctagtgcactatagaaaactttagcacctatgttgtttgacacaattgatgtaagtaaagattcgtaattgttctgccgtgcataattaataatgaaattaatgagctcgctattaatcgatttatcgttattagtaacaaagttgtatttaattaatgatttatgttcttttccaacgtatcgaatttgttctaaggcagctgttgcgataagtgcttcgttttcataacagccaaatacaatacatttcggtgaaccttgatttaaaatgtcatgtattaaggtgtcagtcattgtttgactataatgtgaatcttgagtgaattcttcattgactgtcgaaacaagtctcttatactcattaaaatcattattcgttaatgttttaatttcaatcattactgacctccttaatcattattaagaaagattttgtactaaaaaaatttcttaattacatattaaaatgtttattaaaattttgcaatcattgatttatatgcacattcttgtaaatggattatcaatttaattatatttatttttaagttcaggaaattatggaattggttattggtcgacacgggacttttatttgtagactgtatgcgaagaagtcaagccaggattggaaccggtcacatttatgatgactaagggacaatcattttcagttaaatattgccagaaatttcaatcacgattagaaaaaataaccaaccaaaaatttttggttggcaaatttgaattttatgtgaattttattaataacgttgaataatctctttaagttaatgctaatctacaacatttacatttaaatcgacattaatatttccatgagtcgcttttgaatatggacaaaattcatgagccatttgtaaatatttttcagcttcttcttgagatataacatttttaattgtcgcatcaattgaaacacttaatttaggactttctgagtctggatcatcttctagtctcactgttagtgttacttctggatgagcatcacgcactttgttttgctttaaaattaggtcgaaggcaccgttgaagcaagatgcataacctgctgcaaataattgttcggggttagtagctttaccatctgcttgagcaggcggaactatatcaatatctaatgctcgatcatcagtataaacatgtcctttacgtccgccaacattcgtcgctttagtttcataatgtattgccatacttataacctcctaatttaaaatacatttatgctttacccattcgaaaataccttaatcattttcatttatagcattgtttgattgaaggataaaaagttgttgtttacaataaaaataatgagtatctgaaatgagggatttactatgacacatgtggaagtagtagcgactatcgcgccacaattatatatcgaagaaactttaattcaaaaaattaatcatcgtattgatgcaatagacgtattagaattacgaattgatcaaattgaaaatgtcacagttaatcaagtggcagaaatgattacaaagctgaaggttatgcaagattcattcaaattattagttacgtatcgtacaaagttacaaggtggctatgggcaatttacaaatgacttgtatcttaatttaatatcagacttagcaaatatcaatggtatagatatgattgatatagaatggcaagcagatattgacattgaaaaacatcaacgaatcattacacatttgcaacaatataataaagaggtggttatatcacatcataatttcgaaagtacgcctccgttagatgaattgcaatttatattttttaaaatgcaaaaattcaacccagaatacgttaaattagcagtaatgccacataataaaaatgatgtgttaaatttattgcaggcaatgtcaacattttcagatactatggactgcaaagttgttggtatttcaatgtctaaacttggactaataagtagaacggctcaaggcgtttttggtggtgcgttgacttatggttgtatcggagaaccacaagctccaggacagattgatgttactgatttaaaagcacaagtgactttatactaataaaatgaattaggttgcttttgtgtaagtgctgtcttataattgaaaagtattatcattgttcgtggaggagcgattttagatggaattacaacaagcaatagctaatagaagaagtgtgaaaaaatttaaaagagatatgcacatagatgacgcattgctatatcaagcaattgagaaagctgctgatgctccaaatcacggaatgagggaaccatggagagttgtgcatgttccgaaagacagattaggagatatgagtaaggatatttctaaatttgcatttcctaatgaattagataagcaacaatgtcattatgatgcagtaacgaaactaggtggcatgttattgcttattttaaaaacagatccaagacaacgtcaaaatgatgaaaactactttgcatttggagcatatgcacaaaatcttatgttgttactttatgaagcgggaataggtacatgttggaaatcgccattatatatctatgatcctaaagtaagaaaaacacttggtataaagaaagatgaagttcttgctggattcttatatttaacggatttagaagaagatatgcctaaagcaccacgtaaaaatagaaacttaattacattatattaatatgtataattatagaaacattaataaaagctgagacatgaattgatggacatctatcgagttagagatttaatctaatttactagagtcggtacaatcacagtctcagctttttattgtgcagtatatacacatttgtattttagtatttatttaaaagtttctgctaaaaatgattcaacttgttcaggtgacttagcatttgctgaatgaaggtgtgcaattttgtcgccgtttttaaatactagcaagctagggatacccataacttcattttcaacaactacatcttctaattcatcacgattaacagtgtaccattggtaatcattatattgttctacgattgggtcaatccataaatccatagcacgacagtctgggcaccatcctgcctcaaatttaacaattacaggtgtatcgctattaattacagatttaaatgattcattacttttgattgcttgcattgtaacaactcctctagatagtttaataatttttattatagctaaatttataacataataaaaaattttagcttcaaaatgaaagccttttgctatggaaaatgatatatttattttaaatacataaaggaggttgcagtcgtatgattaaattttaccaatataagaattgtacaacttgtaaaaaggcagcaaagtttttagatgaatatggcgtaagttatgaaccaattgatatcgttcaacatacacctacaataaatgaatttaaaacaataattgcaaatacaggcgtagaaattaataaattgtttaatacacacggcgcgaaatatcgtgagcttgatttgaaaaataaattacaaactttatcagatgatgaaaagttagagttgttatcatctgatggtatgttagtaaagcgtcctctagcagtaatgggcgataagataacattaggatttaaagaagatcaatataaagagacttggttagcgtaagcataatgtaaacgtttactaaatatctcgatatttagattcattacatgtaaaatgaaataagctatacaattgttaatttttataaatatagttgaatagcatctagccttatggcatcattaatgatgtaaagattaattaggaggggattctcttggcagtaccaaatgaattgaaatattcaaaagagcatgaatgggttaaggttgaaggtaatgtagcaacaattggaatcacagaatacgcacaaagcgagttaggtgatattgtttttgttgaattaccagaaacagatgatgaaattaatgaaggggatacgtttggtagcgtagaatcagttaaaactgtatcagaattatatgcaccaatctctggtaaagtagttgaagtcaacgaagaactagaagatagtcccgaatttgtaaatgaatctccatacgaaaaagcatggatggtaaaagtagaaattagtgatgaaagtcagcttgaagctttattaacagctgaaaaatattcagaaatgattggtgaataatcaccatataactccttaatctaagattgaggagtttatttttagtctgagtaagtaaataatatgaaagaaaatttattaggtactattatttggagtattgttacattttattattcaagaatgatgaaaataatgaatttagctattttaaaaataaaaattgggggaagttaatatgctaaacattcaagacgtaagtcatctttctaaaaaggagcaaaaagcatataaccgtttcgtagaatctgtagaaaacggtaatttaccagtactgccatgtattgaaatggatctaaaagagatgcaagaagaaacattaagccagagtatgattggtggaatgccatttttaaaatcttttaaagatataccattagatgaaaataatgtaccaatggtattgctagcacagattaatttggatgatcttccggaacaacaagaattatttcctgtaaaagaagggatattgcagttttggattagttcagaagatcaaatgtatggtatgtctgaaaatttaaagggaaacaatataaactcaaggcttgtttatataaaagagccaattacagatttatcactcaaagatattcaagcgcatttgaagtcattagatgctgataatgaggatatcccgttcagtggagcattttctatagaatttagattgtcgaaacaaactattacatgtactgattataagtacgatgaggacgtgcttgcattgtggaataaagttaatccatccttcgcgctaaaatcgatgtttggtggatatgatgaattaatggaacctgtgtgtaacacatttactgctaaggaaccatttaatcaacttggtggttatccatattttgaccaaatagatccaagaacgaacgatcaagaactgaaaatgtatgatagagtcttactgcaaattgattctacaagagatggtaattcttcgattatatggggtgatttaggcattgccaatatcttagtaaaatctactgaccttgaggctatgaagtttgatgattacatgtattcatgggattgcagctaagagaatcataaaaatatattactttaataagtgtagtaactatagatcaatctagggagtgggacagaaatgaaaaagaaccactagtgatttataatgtagtggttctttttcataagccacagctaatgtgtacttaaaaataggtatacatgagtaaaactcatgcataagaaatactaatttctaaagaaaaagtatttctttatgttggggtcccaccccaactcgcattgcctgtagaatttcttttcgaaattctccatgttggggccccactataattgaaaaatgcttgttataggtgtattttcttttggttaactattggtaatataacattgtagattttaggatgttgatttatggtttagcctttgtctgtttatgtaaaatatcccagctagtcaaacattgattttgtaattattatattaagctagtttaaatttttgtgatttatgttttattcataccaattttgtgaaatgatacagtgacagatgtttattgattttaaagggtgatgatgatggctattgtaaataaagtgataattgttgaaggaaaatctgataaaaaaagggtgcaacaggttattgcagaaccagtcaatattatttgtactcatggaacaatgagtatagataagcttgatgatatgatagaatcactatatgataaacaagtttttgtattagccgattctgatgacgaaggagatcgaattagaaattggtttaaacgttatttgagtgaaagcgaacatatatttattgataaaacttactgtcaagttgcgaattgccccaaacaatatttggcacatgtactttcaaaacatggctttacttgtaagaaagaaacacctttcttaccgaatataaataatgaaaggttagttttagtaaatgaataattcattagacatcaaagatgtaactacattttatgaggaagacaaacatttaatctttggttatacaccaacttgtggtacttgtaaggtttcagaaagaatgttagacattgctaatgaaatattgcagttgccattattgaaaatagatttaaacttttatcctcggttttgtaaagatatgcaaatcatgtctacgccgattttattgttgatgaataaagataaagaagtaaaacgaatttatgcatttaaatcggtgactgatttgttagaaaatttaaaatagttattgacgaaattttactaaggtgttaggattaatacaaattaaatgatgcgtaaactcttatcgagagtggtggagggatgtgccctacgaagcccggcaaccgtcttatatagaaatggtgccaattcacataaagttttaacttttgaagatgagagaaacaatactactattgctttctcaatttttctatcgatattgagaaagcattttttattttattaagcaacacagggaggaatcaacgtgattgaattaaaagaagttgttaaagaatatcggactaaaaataaagaagtccttgctgtagatcacgttaatttatcgattcgagcaggatcgatttatggcgtcattggtttttctggagcaggaaaaagtactttgattcgaatgtttaatcatttagaagcgcctacatcaggtgaagttattatagatggagaccatataggccaattgtccaaaaatggattaagagcaaaaagacaaaaagtaagtatgatcttccaacattttaatttgttatggtcaaggactgtgttaaaaaatattatgtttccgcttgaaattgcaggtgtccctagaaggagagcaaagcaaaaagcattagaacttgtcgaactcgtcggtttaaaaggtagagaaaaggcttatccatcagagttatcaggcggacaaaagcaacgtgttgggattgcacgagcgttagctaatgatccaacggtcttgctttgtgatgaggcaacaagtgcacttgatccgcaaacaacagatgaaattttagatctactactaaaaattagagaacaacaaaatttaacaattgtactaattacgcatgaaatgcatgtcattcgtcgtatttgtgatgaagttgcagttatggaaagtggtaaagtgatagaacatggaccggtgacacaggtttttgaaaatccgcaacacgctgtgacaaaacgatttgtgaaagaagatttaaatgatgatttcgaaacatctttaacagaattagagccattagaaaaagatgcttatatcgttagattagttttcgctggttcaactacaaccgagcctattgtatcgagtctatcaactgcctatgatattaaaattaatattttagaagcaaatattaaaaatacaaaaaatggaacagtcggctttttagttctgcatattccatatatttcaagtgtagatttcggaaaattcgaaaaagagttaattgagcgacaagttaaaatggaggtgttaagacatgggtaaatcatttagtgaaattataaatgaaatgattacaatgcctaatattcagtggccagaagtttggactgcaatagtcgaaacactatacatgacagttgtctcaactatatttgcatttatactcggtcttattttaggtgtgttattattcttgtctgctaaaggtaagtctatcggtgcaaggttattttattctatcgtttctttcattgttaacttatttagagcgataccatttattattttaattttattattaattccatttacaagtttgatacttggaacgataagtggtccgacaggtgcgttaccagccttgatcattggcgcagcgccgttttatgcaaggctcgtagaaattgcttttaaagaaattgataaaggtgtcatcgaagcggcctggtcaatgggtgctaatacttggacagtaattcgtaaagtcctcttacctgaagccatgccagcgctagtgtctggcattacagttacagcaatcgctttagttggttcaacggcagttgcaggtgtaattggtgccggtggtttaggaaatttagcatacttaacaggtttcactcgaaatcaaaatgatgtcattttagtatcaacagtttttattttaattattgtatttataatccaattcattggggattggcttacaaataaacttgataaacgataaattgggggtttcattttatgaaaaaattatttggtcttattttagtattaacatttgcagttgcattagcagcttgcggtaatggaagcaaaggtggcagtgacgacaagaaaataacagtaggtgcttcaccagcaccacatgctgaaattttagaaaaagcaaaaccattattagagaaaaaaggttatgaactagatattaaaacaattaacgattacactacgcctaataaattactagacaaaggtgaaattgacgcaaactatttccaacatacaccatatttaaacacagagaaaaaggataaaggttacaaaatcgtaagtgccggtgatgttcacttagaacctatggctgtatactctaaaaagtataaaagtttaaaagaattaccaaaaggtgcaacagtttatgtgtctaataatccagctgaacaaggacgtttcttaaaattcttcgttgatgcaggtttaattaaaatcaaaaaaggcgtaaaaattgaagatgctaagtttagtgatattacagagaataaaaaagatattaagtttaataataaacaatcagcagaattcttacctaaaatttatcaaaatgaagacgcggatgctgttatcattaattcaaactttgcaatcgaacaaaaactaaatcctaaaaaagattctattgctgtagaaagtgcgaaagataatccttatgcaaacttaattgctgttaaagaaggacatcaagatgataagaaaatcaaagcattaattgaagtattacaatctaaagatattcaagactttattaatgaaaaatacaacggtgcagttattcctgctaaataattattaattagagctcattgactgatatgctcccatcaaagtagacattgaaaaaatgcaaactttgatgggagtttttttaaattagaatcaatatgaaatgtggaagatttaatatgataagagatgaataactatgtataaatgattatcaagtcattatgtattaaatgaaagcctatacgcttctgtgacttcaatcaatgtccaaagctttacaatgttatataagcagtagttgattgaatgaaaatacgattgtaacaacctttttacaataattgcggggccccaacatagagaaattggattcccaatttctacagacaatgcaagttggcggggtcccaacacagagaatttcaaaaagaaattctacaaacaatgcaagttggggtggggccccaacacagaagctgacgaaaagtcagcttacgataatgtgcaagttggggttggacgacgaaataaattttgcgaaaatatcatttctgtcccactccctcaagttaatgatgaatctatttcgctagttataaaatgacgtcaaatcaatatcaaaaattatttaagtaaaatgtttagataatttttcagtgggtaagtattatatataacatttaattattccgaggaggcatttattatggcagacgaaagtaaatttgaacaagcaaaaggtaatgttaaagaaacattaggtaatgttactgataataaaaatttagaaaacgaaggtaaagaagataaagcttctggtaaagcgaaagaattcgttgaaaatgcaaaagaaaaagcaactgattttattgataaagtaaaaggtaacaaaggcgagtaattttactttttattcctaatacactgcacatgccacttagtcggtataaccatcggctaggtggttttttgtattaaaaaagtggatacaaaaatttattaataattattttaatgttagaaaaaaactaaataaaaactcgctaatgatatccaacaatatgtatacaaaacgagacatatattgcatatgattaacgagatactgaatatattttatcacccctaaaatgattattcattttcagcggtaattcgacctaaagtcaaacttacaataaaaccgatgataaatactactaatgaaacgaaccacatcacgatattagttggtaaacctggaaatactgcaaagagggagccaacaacaaaaccaatgattaatgcaaaagtcattagtttatgatgtgttaggaaatactggataattttgcttgaaataatgaatccagcaagcacgccaaatccgactgcaagtaatataggaagaccggcaaagttaagtttaacaacttcagatattgctagcatgactgtgccatagacgccaaatactaataacataaatgaccctgaaatacctgggagtaacatagcactagatgcacacatacctgcaataaagtatttaataataagaccagttgatagagtaagtgtttctccagcatgtttatcgccattattcattaatgtaataacaattaagatagcgataccagctataaccatcatgtaatgtttagttgtaaatgacgttttatagttagaaattttcaataaatatggaacgataccaatgattaatccaccaaagaaaaacatagttggaatatggtgttggcttaataaataattaaaaagattacttagtgatcccattgccagtaacattccaattataatggggattaaaaatgtaaaacttggccaaaaacgtcgtgagaatatgccgctaattgaagcgataaattgattgtatatacctaacaataatgcgatagtcccaccgctaacaccaggtaccaagtcactcgttcccatagcaaaaccttttagaatattaatccatttaaattgttgcatgaataactcctttcaaacgattggaataaagtcataaatagcatcataccatattacaaatgtcctagtgaaatgataacatattttaaattcataaaatccattgagaaattatgtgcacttattatcatttatatttttaaaagagagcggcttagacttgtactttagagttattaaaaataataaaaagggtttaagttgtttatattaaggtataagtaagttataattaactgaacgcattattacaaagtctttttgactacaaattaaaattattataaactagttaagaaaactttatattttacggagggaatataaaatggcatcaacattagaaatcaaagacctacatgtgtctattgaggataaagaaatcttaaaaggtgttaacttgacaattaacactgatgaaatacatgcgattatgggaccaaacgggacaggtaaatcaactttatcatctgcaattatgggacacccaagctatgaagtaactaaaggagaagtacttttagacggtgtaaatattttagaattagaagttgatgaaagagcaaaagcaggattattcttggcaatgcaatatccatcagaaattacaggtgttacaaatgctgatttcatgcgttcagcaatcaatgcgaaacgtgaagaaggacaagaaatcaacttaatgcaatttattaagaaattagataaaaatatggattttctagacatagataaagacatggcacaacgttatttaaatgaagggttctcaggtggagagaagaaacgtaacgaaatcttacaattaatgatgttagaacctaagtttgcaatcttagatgaaatcgattcagggttagacatcgatgcattaaaagttgtatctaaaggtattaaccaaatgcgtggggaaaactttggtgcattaatgatcacacactatcaacgattattaaattacattactcctgataaagtacatgtaatgtatgctggtaaggtcgttaaatctggtggtccagaattagcaaaacgtcttgaagaagaaggatatgaatgggttaaagaagagttcggttcagctgaataatcttattaatacagtatccatgagatgttcatctatatatgatgaaaatgaacatttatacgaaatagtaaatttcatcaagtaggaggaaaaagttatgacaactgatattttgaacatttctgaagaacaacttgttgattattctaaagcccacaatgaaccttcttggatgacagaattacgtaaaaaagctttgaaattaacagaaactttagaaatgccaaaacctgataaaacaaaattaagaaaatgggattttgattcttttaaacaacacgatgtaaaaggtgatgtttatcaatctttatcacaattacctgagtcagtaagagaaattattgacgtagatcattctaaaaatttagtaattcaacataataatacgattgcgtacacacaagttgatgataatgcatcgaaagatggcgttatcgttgaaggtttagcagacgctcttatgaaccatagtgatttagtacaaaagtactttatgaaagatgcagtaacagtagatgaacatcgtatcacagcgctacacacggcattagttaatggtggcgtatttgtttatgttcctaaaaatgtagttgtagaacatccagtacaatacgttgtgttgcacgatgacgaaaatgcaagcttttataaccatgtcatcatcgttactgaagaaagcgccaaagtcacatatgttgaaaattacttatcaaatgcatctggtgaaggaaatcaattaaatattatttctgaagtgattgctggtgcaaattcaaatatcacgtatggctcagtagactatatggataaaggctttacaggtcatatcattcgacgtggtattactgaagcggatgcctcaattaattgggcactaggtttaatgaatgagggtagccaaattattgataatacaacaaatttatttggtgatcgttcaacaagttcacttaaatcagtagttgtaggtacaggcgaacaaaaaattaatctaacatctaaaatcgtacaatatggtaaagaaacagatggttatatccttaaacatggtgttatgaaagaacatgcatcatctgtatttaatggtatcggctacattaagcatggtggaactaaatcaattgctaatcaggaatcacgtgtattaatgttatctgaacatgctcgtggtgacgcgaatccaattttattaattgatgaagatgatgtacaagctggtcatgctgcatcagtaggtcgtgttgatccagatcaactttactatttaatgagccgtggtatttctcaaagagaagcggaacgtcttgttatacatggtttcttagatccagtagtacgtgaattacctatcgaagacgttaaacgtcaattgagagaagtaattgaacgcaaagtttctaaataatattttgaaaataaaagtttgtaatagatatagactgtcgatattggtataagactaatacaacgtcagtatttaaatgattaggatttttatttaagaaaggtcgtgaatgaagtggccgaacactcatttgacgttaatgaagtaatcaaggattttccgatattagatcaaaaagtcaatggcaaacgtttagcatatcttgattcaacagcgacaagtcaaacgcctgtgcaagtgttaaatgttttagaggattactacaagcgttataattcaaacgttcatcgtggtgttcatacattaggatcattggcaactgatggttatgaaaatgcccgtgaaaccgttcgtcgttttattaatgcgaagtattttgaagaaatcattttcacacgcggaacaactgcatcgattaaccttgtagcacatagctatggtgatgcaaatgttgaagagggcgatgaaattgttgtcactgaaatggaacatcatgccaatattgttccttggcaacagttagcaaagcgtaaaaatgcgacattgaaatttataccaatgacagctgacggggaattaaacatcgaagatattaagcaaacgattaatgataaaacaaagatcgttgctattgcacatatttctaatgtactcggtacaattaatgatgttaaaaacattgcagaaatagctcatcaacatggtgcaattatcagtgttgatggggcgcaagcagcaccacatatgaaacttgatatgcaagaaatgaatgctgatttttatagttttagtggacataaaatgcttggaccaacaggtattggcgtattatttggtaaacgtgagttactacaaaaaatggaaccgattgagttcggtggcgacatgattgattttgtaagtaagtatgatgcaacatgggctgatttacctactaaatttgaggcgggtactccattaattgctcaagcaattgggcttgcagaagctattcgctatttagaacgcataggttttgatgcaattcataaatatgaacaagaattaacgatatatgcttatgagcaaatgtctgcaattgaaggaattgaaatttatggcccgccaaaggatcgtcgtgcaggtgtaataacgtttaatttacaagatgtacatccacacgatgttgctacagccgtagatacagaaggtgtagcggttagagctgggcatcattgtgcgcaaccgttaatgaaatggttaaatgtgtcttcaacagctagagcgagtttttatatatacaacacgaaagaagacattgatcagttaataaatgccttgaaacaaacgaaggagtttttctcttatgaattttaataatctagatcaattatatagatctgtcattatggatcattataaaaatcctagaaataaaggtgtattagataacgggtctatgacagtagatatgaataacccgacatgcggtgaccgtatacgactaacatttgatatagaagacggcattataaaagatgctaagtttgaaggtgaaggttgttcgatttcaatggcaagtgcatcgatgatgacacaagctgttaaaggtcattcacttggagaagcaatgcaaatgagccaagaatttacgaaaatgatgcttggtgaagactatgtgattacagaagaaatgggagatattgaagcattgcaaggtgtatctcaattcccagctcgtattaaatgtgccacattagcttggaaagcattggaaaaaggtactgttgctaaagaaggtaaagcagaaggtacgactgaagaagaatagaatgctgttaatcatagatgattttgatattagacatataaaagtataaaaatttttataagatgtcatgtcattgttataatatggtttacatcatgaattaaaaacttacgcacgccgttgtaaatatatttttaaggagtgattgaaatggctaaaaaagcacctgatgttggggattataaatatggattccacgacgatgatgtgtccattttcagatcagaacgtggtttaactgagaatatcgttagagaaatttctaacatgaaaaatgagccggaatggatgttagatttccgtcttaaatcattaaaattgttttataaaatgccaatgcctcaatggggtggcgacttatcagaattgaatttcgatgacattacttactatgtaaagccttcagaacaagctgaacgttcatgggatgaagtgccagaagaaattaaaagaactttcgataaattaggaattcctgaagctgaacaaaaatatttagctggcgtttctgctcaatatgaatctgaagttgtttaccataatatggaaaaagaacttgaagaaaaaggtattatctttaaagatacagatagtgctttacaagaaaatgaagaattattcaaaaaatactttgcttctgtagtacctgcagcagataataaatttgcggcgttaaactcagcagtatggtcaggtggttcgttcatttatgtacctaaaaatatcaaactagatacgccactacaagcttatttccgtattaactctgagaacatgggtcaatttgaacgtacattaatcattgctgatgaaggtgcttctgtacattacgtagaaggttgtactgcaccagtttatacaactagttctttacactctgctgttgtggaaatcattgtgcataaagatgcgcacgttcgttatactacgattcaaaactgggcgaacaatgtatacaatttagttacaaaacgtacttttgtttatgaaaacggaaatatggaatgggtagatggtaacttaggttctaagttaacgatgaaatatccaaactgtgttcttttaggtgaaggtgcaaaaggtagtacattatctattgcatttgctggtaaaggacaagttcaagatgccggtgctaaaatgattcataaagcgccaaatacatcttcaacaattgtttctaaatctatttctaaaaatggtggtaaagttatttatcgtggtattgtacattttggacgtaaagcaaaaggcgctcgttcaaatattgagtgtgatacattaatcttagataacgaatcaacatcagatacaattccatataacgaagtattcaacgatcaaatatcattagaacatgaagcgaaggtttcaaaagtttctgaagaacaattattctatctaatgagtcgtggtatttctgaagaagaagcgacagaaatgattgttatgggattcatcgaaccatttacaaaagaacttccaatggaatacgcggtcgaaatgaaccgtttaatcaagttcgaaatggaaggtagtattggatagctttaaaccgcgttgttaagccattcttgacttctggaaatggcaattgataccattttgatactgaatataacaaaaagccacattactgtggctttttttgttttataactaaatcggattgatagataagctttgtacttatttatcagtccgatttttgattggtgtaaaaaataatcattgatggtggataaagcgacaacacaattacaacatgattgtggcattagagtgctggtctttattaaattaattgaaaactacatcaaatattctttaaagataattcgatattaattcgattaagattcgttgtataagtgagttaaaataagaaaactattaataatattaagttcactacagatgttgctaatggaccgtaagttttaaagacagctttacttttataaccaacaatcgcatctaaaaattggactaaaatcattgcaatggatatagttatcaaaaatatagcactatgaatgattaaagaaaaaatagctaataaaaataaaggtaagcttcgactaagtgcataatatgcatttatattatggctagatgcacatgcttgaattgaataacctaaacttacactggcactaatgattgtaaatattgctaaaacaaaatacatgttaatccttctttctatatttgaatataaacaagtacttgtctaaagatatttaaaagataattagaataaatttatgagaaacttgttgttatcattataacggtttcaaatcattacaactatgtcataaactgaatttgttgaaatttttcattatgtaaatttattcgtaacaatcaggtcgaactatagcatcattttactaatgaatgcattaaagtaactatgactaaaaatgcatattaattatcattattaagactattatatataatgaattttaactggtttattaaacgaaaacgtcgggaattaagtaactacaataaaaataagatatgacaataaggagactacacgcgtgatcattgccataattatattgatatttatttcgtttttcttttcaggaagcgagacggcattaacggctgccaataaaacaaaatttaaaactgaagctgacaaaggtgataaaaaagcaaaaggcattgtaaaattaattgaaaaaccaagtgagtttattacaacgattctaattgggaataatgtcgcgaatattttattaccaacacttgttacaattatggctttacgttgggggattagcgttggtattgcatcagctgttttaacagttgttatcattttgatttccgaagtgattcccaagtctgtcgctgcaacatttccagataaaataacaagacttgtatatccaattattaatatttgtgtaattgtgttccgtcctatcacattacttttaaataagttgacggacagtattaatcgaagtttatctaagggtcaacctcaagaacatcaattttcaaaagaagaatttaaaacaatgttagcaattgctggacatgaaggtgctttaaatgaaattgagacgagtaggttggaaggtgtcattaattttgaaaatttaaaagtaaaagatgttgatacaacacctagaattaatgtgacggcatttgcttcaaatgcaacatacgaagaagtttatgaaacggttatgaataagccatacactagatatccagtgtacgagggagatattgataacattattggggtgtttcattctaaatatctgttggcttggagtaataaaaaagaaaatcaaattacaaactattcagctaagccattatttgtgaatgaacacaataaagctgaatgggtattacgtaagatgactatttctagaaaacatttagcaattgtgttggacgaatttggtggtactgaagcgatagtgtcacatgaagacttaattgaagaattattaggtatggaaattgaagatgagatggataaaaaggaaaaagaaaaactttctcaacagcaaattcaatttcaacaacggaaaaatcgcaacgtatctatataaggagcgaacagctatgtggaataagaatcgacttactcaaatgttaagtattgaatatccaattatacaagcaggtatggcaggaagtacgacaccgaaattagttgcatcagtaagtaacagtggtggattaggcacaataggcgcaggttactttaatactcagcaattagaagacgaaatagattatgtacgccaattaacgtcaaattcttttggtgtaaatgtctttgtaccaagtcaacaatcatataccagtagtcaaattgaaaatatgaatgcatggttaaaaccttatcgacgcgcattacatttagaagagccggttgtaaaaattaccgaagaacaacaatttaagtgtcatattgatacgataattaaaaagcaagtgcctgtatgttgttttacttttggaattccaaatgaatctattataaaaagattgaaagaagcaaacattaagctaataggtacagcaacaagtgttgatgaagctattgcgaatgaaaaagcgggaatggatgctatcgttgctcaaggtagtgaagcaggtggacatcgtggttcatttttaaaacctaaaaatcaattacctatggttggaacaatatctttagtgccacaaattgtagatgtcgtttcaattccggtcattgccgctggtggaattatggacggtagaggagttttggcaagtattgtcttaggtgcagaaggggtacaaatgggcaccgcatttttaacatcacgagatagtaatgcatcagaactactgcgagacgcaattataaatagtaaagaaacagatacagtcgttacaaaagcgtttagtggaaagcttgcacgcggtatcaacaataggtttatcgaagaaatgtcccaatacgaaggcgacatcccagattatccaatacaaaatgagctaacaagtagcataagaaaagccgcagcaaacatcggcgacaaagagttaacacatatgtggagtggacaaagcccgcgactagcaacaacgcatcctgccaacaccatcatgtccaatataatcaatcaaattaatcaaatcatgcaatataaataatcgaccgcaatccacaaaagcacaagtactcccaaacattattttagtgcttgccattgtggattgcgtttctattttaccaatctaatcaaacgaaaacatcaagctaaagttcgctgaaatgattatgataaaagttatatggtatgatgacattggtgatatatatgataaacatcggattaacaggttggggtgatcactattcattatatgaagatttagaacgccaaaccgataaacttaaaacatatgctggacattttccggttgtcgaattagatgcgacatactatgcgatacaaccggaaagaaatatattgaaatggataaaagaaacgcctgatacatttgaatttgtgattaaaattcatcaagcactcacattgcatgcagactacaaaacatttgcagattcaaggcaagaactatttgatcaatttaagaatatgatagagcccttacatacacagaaaaaattagcaatggtattggttcaatttcctccatggtttgactgcaatgcacaaaatatcaaatatattttgtatgtaagacaacaattacaagcatttccaatgtgtgtagaatttaggcatcaatcatggtttagtgatgcatttaaagaacaaacattggcatttttaacagaacatcaaatcattcatgcagtagttgatgaaccacaagtgaaagatggcagtgtacctttagtcaatcgaatcacaaatgaaattgcgtttgtacgttatcatggacgtaatcattacggttggactaagaaagatatgtcagatcaagaatggcgagatgtacgctatttatatgattataatgagcaagaattaatagacttggcacaaaaggcacaaatattagcacaaaaagctaagaaagtttacgtcatatttaacaataattctggtggtcatgcagcaaataatgccaaaacatatcagcgattattgaatatagaatatgaagggttagcaccacaacaattaaaattattttaagaggcgacgactatgttattaacaattacattattagtactaatcggtggtttgtcagcaatcatcggatcaatcgttggtattgggggcggtattattatcgttccaacaatggtttacctcggtgttgaacatgggttattacataatattacaacgcaaatagcgattgggacatcgtctgtcattctaattgtgacaggactttcttcatcgcttggatatctaaaaacaaaacaagttgatattaaaaatggctctatctttttatttggattattaccaggttcattgcttgggtcattcattagtagatatttaacatttgagtcatttaatttatattttggaatctttttaatctttgtagctattttattaatggtaagaaataagattaaaccgtttaaaatatttgataaaccaaagtatgaaaaaacttatgtagacgctaaaggtaaaacatatcattatagtgtgccaccattgtttgcttttattacaacgtttttaattggtatattgacaggtttatttggtattggaggtggcgcactaatgacgccactaatgcttattgtatttagatttccacctcatgtagctgttggaacaagtatgatgatgatattcttttcaagtgtcatgagttctatagggcacattgctcaagggcacgtagcttggggttatgcaatcattttaattatttctagttattttggtgcgaaaatcggtgtcaaagtgaatcaatcaattaagtcagatacggtagtaacattattgagaacagtaatgttgttaatgggtatatatttaattattcgtgcgttgatttaatacaactttaaaaggaggacgtcaatttgaggcttacaatttatcatacgaacgatattcatagtcatttacatgaatacgaacgcatcaaagcatatatggcagaacaacggccacgacttaatcatccttctttatatgttgatctaggtgatcatgtagatttatccgcacctataactgaagcaactttaggtaaaaagaatgtggcattactaaatgaagcaaaatgtgatgttgcgacaatcggtaataatgaagggatgaccatttcacacgaagctttaaatcacctttacgacgaagcaaaatttatagtgacatgtagcaatgttatagatgaatcaggtcatttaccaaataatatcgtttcttcttatattaaggatatagacggtgtgaaaatactattcgttgcagcgacagcaccttttaccccattttatcgtgcactagattggattgttaccgatccacttgaatctataaaagaagaaattgaacatcaacgaggtaaatttgatgtattaatcgtgctaagtcattgtggcattttcttcgatgaaacattatgccaagaattgcctgaaattgatgtcatttttggtagtcatacgcatcattattttgaacatggtgaaatcaataatggtgtactgatggcggcagctggaaagtatggtaattatcttggagaggttaatttaacttttgaggcacataaagtagtacataaaactgcaaagattattcctttagaaacattacctgaagttaaaacttcatttgaagaagaaggaaaaacgttaatgtccaatccagtaattcaacatccagtagtgcttaaacgtagtatgaaccacataactgaagctgcatacttattagctcaaagtgtttgtgagtatacacatgcacaatgtgctatcatcaatgctggcttactcgttaaagatattgtaaaagataaagtgacagaatatgacattcatcaaatgttaccgcatccgattaatatggtaagggttagactttctggtgtgaaattaaaagagattatagctaaaagtaataaacaagaatatatgtatgaacatgcacaaggtttgggtttcagagggaatatatttggaggatatattctttataatttagggtacattcattctacagggcgttactatctgaatggagaagaaatcgaagacgataaagaatatgtactaggtacgatagatatgtatacgttcggtcgttatttcccaacattgaaagaattaccaaaagagtatttaatgccagagtttttaagagatatatttaaagaaaaattattggaatattaaaaagtaagattattggattttcatttgtcatgaatttcgatataatgtttaaagatacacttaacaggagggtatgtgttgttatggcgacaaaaaacgaggaaatattacgtaaaccggattggttgaaaataaaattaaataccaacgaaaactatacaggacttaagaagatgatgagggaaaaaaatcttaatactgtatgtgaagaagctaaatgtcctaatatacatgaatgttggggtgcacgtcgtacagcgacatttatgattttaggtgccgtatgtacaagagcttgtcgtttttgtgcggttaagacaggtttacctaatgaacttgatttaaatgagcctgaacgtgtagctgaatcagttgaattaatgaacttgaaacacgttgttatcactgctgttgcgcgtgatgatttaagagatgctggttcaaatgtttatgctgagacagtacgtaaagttagagaaagaaatccatttacaacgattgaaattttaccatcagatatgggcggggactatgatgcgttagaaacattaatggcttcaagacctgacattttaaaccataatattgaaactgttcgtcgattaacaccgagagttcgtgcgcgtgcgacttacgacagaacattagagtttttacgtcgttcaaaagaattacaaccggatatcccaactaaatcaagtattatggttggattaggtgaaactatagaagaaatttatgaaacgatggatgatttacgtgcgaatgatgtagatattttaacgattggtcaatatttacaaccttcacgtaaacatttaaaggttcaaaaatattacacgcctttagagtttggtaaattaagaaaagtggcaatggataaagggtttaaacattgccaagctggacctttagttcgtagttcttatcatgccgatgagcaagtaaatgaagctgctaaagaaaagcaacgccaaggtgaggcacagttaaatagttaatatttaaccattaaaaaggcataaaggcttagtttgtacaaaacgaacgtgtcatagaagtaatcattatttttatgaaacactaaaagtataaactgagcctttcattgtcatagataggtgaagaatttgataaaagtagatcaacattactttgaattaatagaaaattatcgcgaatgttttaatgaagaacaatttattgctaggtattcagatattttagataaatatgattacatagttggtgactatggttacgatcaattacgattaaaaggcttttacaaagattctaataaaaaagcagagatgagtaaacgtttttcaaatattcaagattacatatttgaatattgtaactttggttgtccttactttgtattaagacatttgtctaaacaagaggttaaaaagttaatcgaagaagttcatccgtctgatgtgatagatgacgacaataaacttcaagatgtgaagattaagccaaccattcaagatactgaacattaataaaacccttagctagattgaaaatgggaatcatgcaattcaagcatggacctgtaatctagttaggggtttttatctttaatgaatgacttcatttaaatactcagtaatttcatcgccttcttcagcatttacacctaaaatatgagcgatatagccttcttcttttaaatcatcagtaccgataataccgaatttatttgtttgcatattaagtacgagtgtcttaccataatgtctatttgtatggactaacattaaatcatatcgaccatgctcgccaacaaaaccaacaaactgaacttgactctcttcgttgtcatcatataaatacatatcaatcattttgtagtgactccttttaaaagtagtaaagttagtataacgacaaatgaagtatactgcaaaattatgataatatataagcgagaggtgacaaggaatgtattttgtagacaaagataaactaactcagaaattagcctatttacaagcattaactgatgattatcatgagagtaagcacaatcattatgcatttgaacgcattgctcaaatgttgatagaatcatcggtagatatagggaatatgattatcgatgcatttattttaagggatcctggtaattataaagatgtgattgatatattagaactagaaaatgtaattaccaaagaaacacagcaggcgattaataaaactgtcgatattcgtaaacaatttacatatgattacacagccttagatattaaggttatcatgccaatgtttgatgacgcattaccatattacaaacaatttattacagaagtaacgacatttttacatcaagaaaatgtaccagtaacagcttttggtaaaggagaaaatcaataatgaaacagtataaagcgtatttaatcgatttagatggcacaatgtatatgggaacagatgagattgatggagcaaaacaattcatcgattatttaaatgtaaaaggcattcctcatttatacgtaactaataattcaacgaaaacacctgagcaagtaactgaaaaattacgtgaaatgcacattgatgataaaccagaagaggttgtaacgtcagcgttagccactgctgattatatttcagaacaatcaccaggagcatcagtatatatgttaggtggtagtggtttaaatactgcgttaaccgaagcggggcttatcattaaaaatgacgagcatgttgattatgtagttattggacttgacgaacaagttacatatgaaaagcttgcgattgcaacgttaggtgtaagaaatggagcaacatttatttctacaaatccagatgtatcaattccaaaagagcgaggatttttaccagggaatggtgctattacaagtgttgtaagtgtatcgacaggtgtatcgccacaatttattggtaaaccagaaccgattattatggttaaagcattagaaattttaggactagataaatccgaagttgctatggtaggcgatttgtacgataccgatattatgtctggtattaacgtaggtatggatacgattcatgtacaaacaggtgtatccacgttagaagatgtgcaaaataaaaatgtgccaccaacgtattcttttaaagatttaaatgaagcaatagctgaattagaaaaatagatatagtcattttataaagtaggtgaattgatttggtaaaaatagttgtttcgaggaaaattccagataaattttatcaacaattaagtaaacttggtgacgttgttatgtggcaaaaatcattagtgcctatgcctaaagatcaatttgtgacagcacttcgtgatgcagatgcttgttttatcacattaaatgaacagatcgatgcagaaattttagcacaatcaccaaatttaaaagtaattgcgaatatggctgtaggatatgacaacatcgatgttgaaagtgcaacagcgaacaacgtggttgtcacgaatacaccaaatgtacttactgaaacaactgcagaattaggatttacattaatgcttgctatagcacgtcgtattgtagaagctgaaaaatatgtagaagcagatgcatggcaaagctggggtccttatttattgtcaggtaaagatgtcttcaattcaactattggaatatatggtatgggagatattggtaaagcttttgcaagaaggttgcaagggtttaatactaaaattctttatcataatcgatcaagacataaagatgcagaggcagaccttaatgcaacatatgtttcttttgaaacgttgttagcagaaagtgattttatcatctgtacagcgccacttacaaaagaaacacatcataaatttaatgctgaagcatttgcacaaatgaaaaatgatgcaatttttattaatatcggtagagggcaaattgtagatgaaacagcattaatcaatgcactagacaataaagaaatattagcatgtggtttagatgtattagcaaatgaaccaattgatcatacacatccattaatgggacgtgataatgtactgattacaccacatattggcagcgcatcagtaacgacacgggacaatatgattcaattatgtattaataatatagaagcggttatgacaaatcaggtagcacttactccagtaaattgaaaataagtatggtttttaatcattggtaaaacgagcaaagcaattgttaaatatgctatgcttgacttgctaatgtatatatttgcgctgatgataattcaataacattataaactcgtcatattaatgtgatgagtttatttgattttgacgtatataacaaaattgttatatagactgtaattgtttattgtttaaataacctttaaaatgaatgatgttctcaacaaagtgtatcatttacaataattgagtgatgacaaccaattactatgttgaatctataaaattaaaattgaatttcattatgaatatcgatataatgaattgcaaaaaacaaattttaaaacgtattttatattgaacggtctttataaaggcgtttttactaagaactttaagaggtgcattatgaaatctaaaagtaaacagccacctaataaatatgttgaagcattcaaaccatatttattaacactattgtatttggcaatatttattactttatatttaatttatggcagtggcgacacacacaataacttcatttataatgagttctaatgagggagacttaatatgacagatattattaacaagctgcaagcgtttgcggatacaaatccacaaagcattgctgttagacacacaactgatgaattaacttatcaacagttaatggatgagtctagtaaattagcacatcgattacaaggtagtaagaaaccgatgattttattcggtcacatgtcaccatatatgattgttgggatgattggtgccattaaagcaggatgtggatatgtacctgtagacacttcaattcctgaagaccgtattaaaatgattattaacaaggttcaaccagagtttgtatttaatacgactgatgaatcatttgaaagtttagaaggcgaagtatttacaatagaagatattaaaacatctcaagacccagtaatttttgatagtcagattaaagataacgacacagtatacacaatctttacatctggttctactggggaacctaaaggtgttcaaattgaatatgcaagtttagttcaatttactgagtggatgttagaacttaataaatcaggaaatgaacaacaatggcttaaccaagcgccattttcatttgatttatctgtaatggctatttatccatgtttagcatcaggcggtacattaaatcttgtagataaaaacatgattaataaacctaaattattaaatgaaatgctaacagcaacaccgattaacatttgggtatcaacaccatcatttatggaaatgtgtttattattaccaacgcttaatgaagaacagtatggtagtcttaacgaattcttcttctgtggtgaaattctacctcacagagcagcaaaagcgttagtaagccgtttcccaagtgcgacgatttacaacacatatggtccaactgaagctacggtagcagttacaagtattcaaattacacaagaaatcttagatcaatatccgacattacctgttggcgttgaaagaccaggcgcaagattatctacgacagatgaaggtgaacttgttatcgaaggtcaaagtgtaagtttaggatacttaaaaaatgaccaaaaaacagctgaagtatttaatttcgatgacggtattcgtacttatcacactggtgataaagcgaagtttgaaaatggtcaatggttcattcaaggtcgtattgatttccaaatcaaattgaatggctacagaatggaattagaagaaattgaaacacaattacgccagtctgagttcgtaaaagaagcgattgttgtacctgtatataaaaatgataaagttattcatttaattggtgcaattgtgccaacgactgaagttacggacaatgcagaaatgactaaaaatattaaaaatgacttgaaatcacgcttaccagagtatatgattcctagaaagtttgaatggatggaacaattgccattaacttcaaatggtaaaattgacagaaagaaaattgcagaggtaattaacggatgattccatatggtgattttacattcttcttaattgctttaattgcattattaccagtcattatacttggatttttaggtaagcgaagttacatttataatggcgtagttacagcatttatgattgtgttaatcttttcttctgataaacataatctgtttgaccaaaagtatttaagtgttcaattaattagttttattatttacgtcgtatggcaagttttattgataatgttttattatcattcaaaaccaaaaaataattcattttcaaaatttgtaactgtaatggttttatcaatattgccattagcacttgtgaaagtgttacaaagtacatggttaggtggacatcagattcacttccatgaaagtaaattaattgaatttgttggtttcttaggaatttcttatgttacattcaaaagtgtgcagttaattatggaaattcgtgatggttctatcaaagaaattaaagtatggaaattaattcaatttatttcattcttcccaacgatttcatctggaccaatcgatcgttacaaacgtttcgttaaagacgataaaaaagtaccaacaggcaatgaatatcgtgaattagtattaaaagcaattcacatgattatgcttggtttcttgtataaatatattgttgcttactttattaacacatatgcaatcatgcctttacaattagacttacatggctttgtcaatttgtggttatatatgtacgcatacagcttatatttattctttgactttgcaggttatagtttatttgcgatagcatttagttatttattcggtattaaaacaccaccaaacttcgataaacctttcaaagcgaaaaatattaaagatttctggaatagatggcatatgacattatcattctggttcagagattgtatttacatgagatctttattctacatgtctcgtaaaaaattattgaagagtcaatttgcaatgtctaacgtggcattcttaatcaacttcttcataatgggaatttggcatggtatcgaagtgtattacattgtttatggtttataccatgcagcattgtttataggttatggctattatgaacgttggcgcaagaaacatccgccacgttggcaaaatggtttcacaacagcacttagcattgtgattacattccactttgtaacatttggctttttaatcttctcaggtaaacttatataataaaggagaatttaattatggaatttagagaacaagtattaaatttattagcagaagtagcagaaaatgatattgtaaaagaaaatccagacgtagaaatttttgaagaaggtattattgattctttccaaacagttggattattattagaaattcaaaataaacttgatatcgaagtatctattatggactttgatagagatgagtgggcaacaccaaataaaatcgttgaagcattagaagagttacgatgaaattaaaaccttttttacccattttaattagtggagcggtattcattgtctttctattattacctgctagttggtttacaggattagtaaatgaaaagactgtagaagataatagaacttcattgacagatcaagtactaaaaggcacactcattcaagataagttatacgaatcaaataagtattatcctatatacggctctagtgaattaggtaaagatgacccatttaatcctgcaattgcattaaacaagcataacgccaacaaaaaagcattcttattaggtgctggtggttctacagacttaattaacgcagttgaacttgcatcacagtatgataaattaaaaggtaagaaattaacatttattatttcaccacaatggtttacaaaccatggtttaacgaatcaaaactttgatgctcgtatgtctcaaactcaaattaatcaaatgttccagcagaaaaacatgtctactgaattaaaacgtcgttatgcacagcgtttattacagtttccacatgtacacaataaagaatacttgaaatcttatgctaaaaaccctaaagaaactaaagatagttatatttctggttttaaagagaatcaattgattaaaatagaagcgattaaatcattgtttgcaatggataaatctccattagaacatgttaaacctgctacaaaaccagacgcttcttgggatgagatgaaacaaaaagcagttgaaattggtaaagctgatactacatcgaataaatttggtattagagatcaatactggaaattaattcaagaaagtaagcgtaaagttagacgtgactacgaattcaatgttaattctccagaattccaagatttagaattacttgtaaaaacaatgcgtgctgctggtgcagatgttcaatatgtaagtattccatcaaacggtgtatggtatgaccacattggcatcgacaaagaacgtcgtcaagcagtgtataaaaaaatccattctactgttgtagataatggtggtaaaatttacgatatgactgataaagattatgaaaaatatgttatcagtgatgccgtacacatcggttggaaaggttgggtttatatggatgagcaaattgcgaaacatatgaaaggtgaaccacaacctgaagtagataaacctaaaaattaaaatacaaatagcacataactcaacgattttgattgagcgtatgtgctatttttatattttaaatttcatagaatagaatagtaatatgcggttggatatgtggctataataaaataattaatcagataaatagtataaaataactttcccatcagtccaatttgacagcgaaaaaagacaggtaataactgattataaataattcagtattcctgtctttgttgttattcataatatgttctgttaacttaatatctttatattagaatacttgttctacttctattacaccaggcacttcttcgtgtaatgcacgctcaataccagctttaagagtgattgtagaacttgggcatgtaccacatgcaccatgtaattgtaatttaacaataccgtcttccacgtcaatcaatgagcagtcgccaccatcacgtaataaaaatgggcgaagacgttcaataacttctgctacttgatcaaacatcgttgtatcttcagtaggcatcaggcaagtctcctttcgagagatgaatttgataatctttattagtatattataatagatagtgtaataaaaatctatcaaaccaatgggggataaatatatggagcacgtgagtgtggtagtatatggggcagatgttatatgtgcaagttgcgttaatgcgccaacatcgaaagatatttatgactggctacagccgctattaaaaagaaaatacccaaatataacatttaaatatacgtatatagatattacaaaagataatgacaacttaacagatcatgatttacaatttattgaaagaatagaacaagatgaactattttatccattaattacaatgaacgatgaatatgtagcagatggttatatacaaacaaagcaaatcactcgatttatagaccaaaagcttgtgaatgaataatatacacataataaaaagcaatgtcagtaatagtgtgaactgacattgctttttaatttttaaccattatgatatttatataaccaaagtacgccggattttaaaatagaagcgagtcgtcctgttacagtgcgatccatgatatatgcaaaaccttgtttatctcctaatgacccaacgataccttgtacctttagttccggcattttgtcaggtaatggttcatttagccattgctttttaagcacatcggcaatttgatcaccttgaacttcggctaactgagcacttggcgcatgtggtaaatcagcacaatcaccaactacatagacgttacgatatgttggtacttgatgatactggttaactatcacgcgtccattactatttatatcaatcggcaagttacgaacaacttcaacaggttgaattcctgctgtccatacaactaaatcaatatctttaggttcatcacagttatatattttaccaggttcaactttattaatatttgaatttggaacaacggtaacattatttttggcgaaccatttcgcaacatacttacttaatttttctggaaaatttcttaaaattcgcggcccacggtcataaagatatatttccaagtctgatctactttctcttaattcgctggcaagttctatgccgcttaatccagcaccaacgataccaactttagcaccttctggtagttcactaatactatggaaagtatcccgagcctttgagagtgtttgaatactatgtgtatattcttcggctcctggaacgttatgatatttatcttcacatcccaaaccaatgattagctcatcataatcaattttagaattaccgactgagacaatttgagcatctaaatctatgtcgttaatttcaccataaaccgtattcacttgtgggtgattagggaatttcatgcgaacatctttatctgatttcgtgcccgcagctaaagcataaaattctggtttcaatccatgaaatggcatacgatcaactaatgtgactgtataatcttgtggtaaagatgtagttaaaatgcgtgacatgatacgcatattaccatatccgccgcctaacaaaactaagtttttcataatgaagtaccccttttatatgttaatatttactttaattttgaaaagatcaaagtgcatagatatatttgttaatgagcagttataaaatgcaagtgtctttgattcatcaataacccctaaaaaagtaaatatgtatttatatgcttattatatatttttttgaaaatgactacaaataaatatttgtactaactaaggcactattacataactgggataagaaacatcggttgttgctaattgagcacatcatgttaaaataccagttttaaaatgctataatattgtaacaaatgaaataagaaggtgaagtatgaatccgatcgtagaattttgtctctctaacatggcaaaaggtggagattatgtttttaatcaactggaaaatgacccagatgtcgatgtgttagagtatggttgcctgacacattgtggtatatgttcagccgggttgtatgctttagtaaatggtgatattgttgaaggtgattcgccggaagaattattacaaaatatatatgcacatataaaagaaacttggattttttaaggaggagttatcatgccaacagttatattaacagaagcagctgcctacgaagtaaaagatatgcttaaagcaaatgaaatgccagatggctatttaaaaattaaagtgaatggtggcgggtgcactggtttaacatacggtatgggtgcagaagaagcgcctggtgaaaatgatgaagtcttagaatactttggattaaaagttttagtagacaaaaaagatgcacccgtattaaatggtacgactattgattttaagcaatcattaatgggtggcggtttccaaatcgacaatcctaatgcaattgcatcatgtggctgtggtagttcatttagaactgcaaaagttgcaggtaatcctgaaaactgctaattattaaggttaacccaattttttggatacaaattgatatcaattacgattagggacatatttgattatgtcctatttttgcgtaaagatattttgttttattaaaaagtttatcaaaattaagaatctgactattaatagtattttaaatgatcgtgataacggatacatttttaatcgaaatcacgctacgaaaaaattaattaattttttcacaatctgactgaatcttgcttgaaaatataacataaaagctatagaattagtattggattaaaaatgtcttttttgtgaacatcacaggtttttacataatttaaaagacttaaataacaaaatgatgataaactagtatacattgtggtaaaagtagtaatgaccagttgttactagtaattatcagcatttggttaaaaaaatatgaaagcttaggtgaaattaaatggctcaagatcgtaaaaaagtacttgtacttggtgctggttatgcaggtttacaaactgtaactaaattgcaaaaagcgatatcaacagaagaagcagaaattacgcttattaataaaaatgaatatcactatgaagcaacatggttacatgaagcatcagcaggtacactaaactatgaagatgtattatatcctgtggaaagtgtcttgaagaaagacaaagtgaactttgttcaagcagaagtaacaaaaattgaccgtgatgctaaaaaggtagaaacaaatcaaggtatttatgactttgatattttagtagtagcattaggtttcgttagtgaaacattcggcatcgaaggtatgaaagatcatgctttccaaattgaaaatgttatcacagcacgtgaattatcacgtcatatcgaagacaaatttgctaactatgcagcatcaaaagaaaaagatgataacgatttatctatcttagttggtggtgctggattcacaggtgttgaattcttaggtgaattaacagacagaattcctgaattatgtagcaaatatggtgtggatcaaaataaagttaaaatcacttgtgttgaagcagcacctaaaatgttaccaatgttctcagaagaattagttaaccacgcagttagctacttagaagaccgcggtgttgaatttaaaattgctacaccaatcgttgcttgtaacgaaaaaggtttcgtagttgaagtagatggtgaaaaacaacaattaaatgcaggtacttcagtatgggcagctggtgtacgtggtagtaaattaatggaagaatcatttgaaggcgttaaacgtggacgtatcgttacaaagcaagatttaacaatcaatggttacgacaacatttttgttattggtgactgttcagcgtttatcccagctggagaagaacgtccattaccaactacagcacaaattgcaatgcaacaaggtgaaagtgttgctaaaaacattaaacgcatcttaaacggtgaatcaactgaagaattcgaatacgttgatcgtggaactgtttgttctttaggttcacatgacggtgtaggtatggtatttggtaaacctatcgctggtaaaaaagcagcattcatgaaaaaagtgattgatacacgtgcggtattcaaaatcggtggtatcggtttagcattcaaaaaaggtaaattctaggctttaaattaagttacagctaaacacataaaattaaattattcatttataaagtccttcagtgtcactgaagggctttattgttgtacaatttgaagtgagtaacatatcaaatctaaggaggtacattatgaattttaaattacataacacaataagcaacgaaataaatacgttgattattggtataccagaacatttaaatcagttagagcgcattagttttaatcatatcgatattacagaatcacttgaaagactaaaacatcaacatattattggtagtaaagttgggaagatttatacaactgcatttgatgtacaagatcaaacatatcgtttaattacagttggtttaggaaacttaaaaacacgtagttatcaagatatgttgaaaatatggggacatcttttccaatacataaagtcagaacacattgaagatacgtatttacttatggattcatttatttcaaaatatgatcagttatcagatgtattaatggcatgcggcattcaaagtgagcgtgcaacatatgaattcgatcattataaatcaagtaagaaggcaccgtttaagacgaatttaaaccttattagtgaatcattaattgaattagattttattcatgagggtatcagtattggccaatccattaatttggcaagagactttagtaatatgccaccgaatgtattaacaccacaaacatttgcagaagatattgttaatcattttaaaaatacaaaggtcaaagtagaggttaaagattatgacactttagtttctgaaggattcggacttttacaagcggtaggtaaaggtagtaagcataaaccgagattagtaaccatcacatataatggcaaagacaaagatgaagcaccaattgccttagttggtaaaggtataacatatgattctggtggttatagtattaaaacgaagaatggcatggctacaatgaagtttgacatgtgtggcgctgcgaatgtcgttggtatcattgaagcggctagtcgtttacaactgcctgtaaatattgtcggagtgcttgcttgtgctgaaaatatgataaatgaagcatcaatgaagccagatgatgtatttacagcattaagtggtgaaactgtagaagtaatgaatacagacgctgaaggcagattagtccttgcagatgctgtgtattatgcaaatcaatatcagcctagtgtgattatggactttgctacattaacgggtgcagcaattgttgcactaggcgatgataaagctgctgcatttgaatcgaatagtaaagtgatattaaacgatatattacaaataagttctaaagtcgatgaaatggtatttgaattaccgattactgcaaccgaacgtgcaagtattaaacacagtgatatcgctgatttagttaaccatacgaatggacaaggtaaagcgctatttgcggcaagttttgtaacacattttagtggtcaaacacctcacattcatttcgatattgcaggtccagcaacgactaataaagcttcatataatggtccaaaagggccaacaggatttatgattccgacgatagtacaatggttaaaacaacaataatttaattatttgcctgatacaacttgtgtcttgttatacatttctaatttaactcttgaaagtataaaggatcgcattgtatcaggcattttcattgttgtaagaaaatataaatcgcatatccttgtgagcataaatcaacttgactagcattgcaaaaacgtattataagcatatgttcattcagtcaacgactactaatataacattatagaacttaggattttgattgatgttccaggcttgtaaaattgtttaatttaatgaaggcgaaaattattttaagaaagacaattaactaaaaaataaagattattagtatagtttactattgacaggtgttaaagctactgatactatgtagtctataaacgctttagttcgatagagtgataaaggatggttgtcatatgataaatgcagtagtaatagcagtaatattaatgattgtgctatgtttatgtcgattaaacgtagttataagcttatttatcagtgcgctagttggtggcttaatttcaggcatgagcattgaaaaagttataaatgtatttgggaaaaatatagtcgatggtgctgaggtagcattaagctatgccttattaggtggatttgcagcattaatttcatacagtggtatcacagactatttagtaggaaaaattataaatgcaattcacgctgaaaatagtcgatggtcaagagttaaagtaaaagtgacaataattattgcattattagctatgagtatcatgagtcaaaacttaattcctgtacatattgcattcattccaattgtcatcccaccattgttaagtctgtttaatgacttaaaaatagatagacgtttaatcggtttgattatcggttttggtttatgtttcccgtatgtgttattaccttatggattcggtcaaattttccaacaaattattcaaagtggctttgcaaaggcgaatcacccaattgagtttaatatgatttggaaagcaatgcttattccttcaatggggtatattgttggcttacttatcggcttatatgtatatcgtaaaccacgtgaatatgaaacacgtaaaatttcagatagtgacaatgttacagagttaaaaccatatatcttaatagtaacaattgtagcaatactagctacatttttagtacaaacatttacagattcaatgatttttggtgcactggcaggggtactcgtattctttatttcacgtgcatataattggtatgaattagatgctaagtttgttgaaggtattaaaattatggcttatattggtgtagttattttaacagcaaatggatttgctggtgtaatgaatgctactggtgacatagatgaattagttaaaactttaacaagtattactggtgataataaattatttagcattatcatgatgtatgtgataggtttaattgtcactttaggtattggatcatcatttgcaacaattcctattatcgcatcattattcattccttttggagcgtcaattggactagatacaatggcattaatcgcattgattggaacagcgagtgcattaggtgactcaggttcacctgcaagtgattcaacattaggaccaactgcgggattaaatgttgatggccaacatgatcatatacgcgatacatgtgtaccaaacttcttgttttataatattcctttaatgattttcggtactattgctgctatggtactataagcataaagaggtgaaaatatgactcatttattagagacatttgagatgtcaatagatcaccaggaagatggtttagttgttatttctatgcctgttactgataaagtaaaacaaccatttggatatttacatggtggtgcttcgattgctttaggtgaaacagcgtgttcattaggatctgctaatctaattgatacaaccaaatttattccattaggtttagagatgaatgctaaccatattcattctgctaaagatggtcgtgttactgcgacagctgaaattattcatcaaggtaagtcgacacatgtatgggatataaaaattaagaatgacaaagaacaattaattacagttatgcgtggtacagttgctattaaacctttaaaataaaagaactgctagctgaaatgttatgagatattcataactacggctagcagttttttatgcgctatattgttgtagttttagaaatgcttgttcaatgcgttcggcagctttacggccacccataacatttctaccaaatggtcctaattctaagtctgcaaagcatcctgcgacaaatagatttggtatccattctaatttttcggaaataacagggtaattacattcgttgataggtgcatcataattttgtattaattgcttaataagtggttgtgacataaaatcttgttcaaaaccagttgcaaccataatctgttgatatggaacagaatcattttcagtgttaattaaaccatcactaatttgagtgataggtgttttatgcacatttatacgaccatttttaatatgttttttaaggcgtaagtacagttcgtgaggcattgatcctttatgacgttcacgttgtacaatggcatttctttcaggcatgcatttagtacttaaaaatgaagacatatttttcggacctaaccaaccaggatcagcatcaaagtcatgtatttcaatatctttatttagccataaatgaatctttttatcgtcatcatgatttaacaatttaagtgcaaggtgtgcagcagtaatgccactaccaacgatatgatcggtcttatcatatactacttgatcatgttctttctcgaagatatgatttacattctgtttgtcttttaaaatgtcaggcataaacggaatatttgtactgcctattgcaataacgacgcaatctgtagtgataatttgtccatcttctaacttgatatgccatttgtcttcttgtttatttaaagtttgaactaaaccttgaaccaagcaatcctctaattgatattgtttagaagcatgtgcaatatggtccataaacattgtcaattcaggtcgttgataaggaccataaaaagcatttgtatattggtgctgtttagcgaattgttttagatggaacggttgtggatgtacgtggtgtacaatcggtgatcttaaataaggcatttctattcgatttgtatatgagttaaacctttggcaaaaagtttcgtgtgggtcaatgattgttaatcggtctgttgttaatccgcttgataatagtttttgtgcgattgcagttccctgtatgccaccgccgataattgtccaatgcataataaaacctctctctttttaaagcgtaatcgttacgatttataattattattatcataatacataacgacatgaaaggcaattaaattaaagagatatacgtagatagggcgaagctgtagtcaaagaagtatgtactaaactaaattcattgaaaaagaggtaacaatgtcaaaagaaaacagcagtaaaatcattcctaatttggaatcatcttactgctgtttgttgttgatttatattcatgactttgttaaataatctacaattttgtgtcttttaagtcttccgaaatttcatcgactttagtctttttagtataaggcgttttaatattatatgctgctttcataatcatatgacttgaaagaggacctgtaattaatacaaagataatcgcaacgattaattgcatatttacaaaaccttgagtagcaataaaatatataaacgtaccaaatagtaatgacattgcacctaatgttgatgcttttccggcagcatgtgcacgtgaatatacatcttcaagtctcaataatcctatggctgctagggcgctaattaaagcaccgatgataacaaagataagtgcaagactaatcagtatgattttgatcatgttcaatcaccttacctttgtccataaattttgagaatactgcagtacctaaaaaggctaatataccaatcatcataataacgacaatcatgtatttaatatttaataaaatactgaataatgctataactgccattaattgaagaccaatcgcatctaatgcgacaacacgatcggcaagtgatgggcctagcacaacgcgaatgagcatagctaacatagaaatgacaactatgattaatgcaataacgataataacattatgattcattatatttcgcccacctctcttacaattttctctaatgatgttttaatactttctacttcttgctctttagttgaaaaatctatggcatgaatataaatttttgtacgatcatcacttacaccaagcactacagtaccaggtgttagtgtaattaaattagacaacaagacaatttgccaatctttttttaaatctgtgtgataaacaaagaatcctggttcatttttaatcgaaggtttaataataattttcaaaacatcaaaattagctttaatcagttcgattaagaaaataataattaatttaataatacgatatagcgtgatgacataaaatctacctggtaacactctgtgtaagaggtaaacaagaactaggccaaagatgaaacctaacacaaagttatttgttgtgtaactatttgtcacaaacaaccaaaacactgcgataataaagtttaatactaattgtacagccatgttatttacctcctaatacagctttaacgtaggttgatggattgtagaatgtttctgcaccagcttttaccattggatataagtaatctgctgacaatccatataaaacagttatcacaactgcaacgattgcaatcgtagttaaatatttgacgtcgactttgttattaagatcatatccttttggttgaccgaaaaagccttgtaggaatatgcgaatgacagaatataatacgactaaacttgataataagacgatgacaccacttaaataaaatcctctttcaaatgttgattggacaatgaaaaattttccataaaaaccactgagtgggggaatgccagctaaacttaatgctgcgataaagaatgaccaaccaagtacaggatatcgtttaattaaaccaccaaattgtcttaaatcagcagtgcctgtaattttaatcataattccgataagcaagaataatgcaagttttactaacatgtcgtgcaatgtatagtaaatagcaccaatcatacctgactctgtcatcattgcaacgccgactaagatcacacctacagcaatcatgacattgtataggatgatttttttaatgtttgcatatgcaacagcaccgacacaaccaaagatgatcgttaatagtgctaagaataaaatgacataatgtgaaaagcttacattatcactaaagaataggctcaatgttctagcgattgcataaacaccaacttttgttaacaaagcgccaaagaatgcaatgattggaattggtggtgcatagtatgcactaggtaaccaaacaaacattgggaatacgccagcttttgtagcaaaaacaaagataaatagtatgaaaacgatattgactaagccactgtcatgcgctgaaaggttagctaatttattgcttatatctgctagattcaatgttcctactactgaatataaaatcgctacacccattacgaagaaggatgacgatacaacgttaacaagtacatattttattgtttcttgtagttgaatttttgtagaaccaattactaataagaaataagatgacattaaaaatacttcgaaaaatacgaataggttgaaaatgtcaccagttgtgaatgcaccaatgatacctattaacataaatagtactgaaaaataataataatatctttcacgttcaataccaattgtttggtatgaatataaaatcacaatagctgtaataataatactagtaataattagtagggcactgaatatgtctaaaacaaagacaatactgtaaggcgctttccatgaacctagttcaactcgtaatggtccatgttttacaacatttgctaaattgataattgccgcgaccaaggttaataatgtaccgcctagtgcgacataacgctttataatatgacgttttccaataaagacaagtaatatggctgtaattactggaatgacgagcgttaacacaagcatattactttcaatcatcttctggaactcctttcatactctcaacgttatctgtgcctaattctttatatgttctaaatgctaatactaagaaaaaggctgttgtcgcaaaggcgataacgattgctgttaaaataagtgcttgcgggataggatcaacatagctttttacgttcgcttcataaattggaacagtaccatgtttaagtccacccatagttattaaaaataaatttgctgcatgtgttagtagtgtagttcccataacaattcgtatcagacttttagacaaaacgagatagacactaattgctgtgagaataccactaacaaaaatcataataatttccactattcgttctctccaatcgaaataataattgtcatgacagtaccaactactgcacataaaacaccgaaatcaaagaatactgctgttgtcatatgaacaggttctaatataaataacggtatatcaaatgtgacatgcgtaaagaaatttttacctaaaaaccaacttgcgataggcgtcgcaatacaaaaaactaatccgatacctatcaagattttaaaatctaatgggaaaattttacgcattgtttctatatcaaatgcaatcgtaatgataacaagtgaacttgcgaataataatccgccgacgaaaccgccaccaggtgtataatgtcctgctaagaaaagtgaaaaaccaaagaccattaccatgaaaaagataataactgcagcaaattgcaaaattagatcattttgttgtctattcatgatttttcacctcgttaccttgcgtttgacgctttttacgtaatttaatcattgtatatacagctaatcctgcgataccaagcacagatgactcgaataaagtatccataccacggaaatccacaagtatgacgtttaccatgtttttaccgtgagctaaatcataaacatgctcttgataaaacttagatatcgattcaaaatgtctatttccgtatgcaattaaaccgataataatgacggacaaaccaacaccaccagcaattaaagcattagtaagctggaatgagcgcttttcattataacgatttaaatttggtaagtggtagaagcataataagaacaatgctgttgaaatagattcaacgacaaactgtgtcaatgctaagtcgggtgctttaaagaatataaacaatacagacacagcatatccaactgcacttaacataatgatgctaaataatcttgatttagcgaaaagaattaaaaaggcagcacttaataataaaattacgatacaaacttcgaaaattctaatcggactaacgtctttaaaattaatgttgaaaggtactgagaatacagtgacaaatgttaataaaattaatgcaccaaaaatgataactaaattattacgtgaataatcggtaacatagctattcgtcatcttttcagagtagtttggaataacatttgcacttctgttgtaccaataattgaatgttagtttaccaggttgtcgttgcaacaatttcacccaataactaaatgtcacaattagtaagatacctaaaatataaattactaatgttgataaaaaggcaggcgttaatccatggaacatatggaattcaacatcatcaattaccgtatgattaatcgaagatgtagctggttcaataatcgaattagttaaaatgccagggaacaaaccaaatacaattactaatgtagctaaaatagctggtgataaaagcattaatattgatacttcgtgtgcttttttaggtaattgttcaggtttatattgtccgaaaaatatatgcattataaatttaattgaatatacaaatgtgaagacactgcccactataccaatgattgggaataggtagcctaatgtatcaacactgaataaatttgcttggcttgctgtaaatgttgtttctaaaaatgattcttttgataagaaaccattgaacggtggtacaccagccatacttaatgccgtaataacagtgattgtaaatgaaataggcataattgttagtaagccacctaatttcttaacatcacgtgtaccagtagaatgatccactgcacctgtaatcataaatagggcacctttaaatgttgcatggttgattaaatggaatattgcagccgtaaatgcagcagcatatattttgctatcatcgccttgatagtgataactaatggcaccgattccaagcatcgccataatcatacctaattgggatactgttgaaaatgccagtatacctttcaagtcttgttgttttgttgcgtttagcgaagcccagaataacgtaattaaaccaacgagtgtgacagtccatatccaaccttgcgatgctgcgaagattggtgtcattcgagcgattaaatataaacctgctttaaccattgttgctgaatgaagataagcactgactggtgtaggtgcttccattgcatctggtagccaaatataaaatggaaactgagcagattttgtaaaagcaccaatcatgattaaaatcatcgcaaaaatgaagaatgggctattttgaatttcagaagcatgttgaatcatgtactgaatgctaaatgattgcgttggtatagcgagtaagatgataccacctaataatgatagaccaccaaatactgtgattatgagcgatttttgagcaccatatatagatgcttgtcgttcgcgccagaatgaaataagtaaaaaactagaaaatgacgttagctcccagaataaatatagaataataacattatctgaaagtacgacacctaacattgcacccataaatagtaataaataacaataaaaattccctagttgttctgacttacttaagtagccgattgaatataatactactaaactgccgattcctgaaataagcaaactaaagagtaaacctaagccatcaagatataaatcaaagttcataccaaaatgaggcatccaatttaaggttttcattacagtattacctgacatcgtcgttttaattaatgtaagcatataaataaatattacgatagggacaggtaatacgaaccatcctaaatgtatacgtttaaaaaatctatacaggataggaataatgagtgcgaatattaacggtaatatcaccgcaatatgtaacaaactcactatgttgtcctcctttaaaaaatatttatgttattcattatacatgaatgatatagttctgaaaaacgtacacactccttgttgtgctttattttcagaagtatttaaataagaagaaacacgtcattttttatttaaaattttctttgtattgaagtgaataatcttcttttaagcgtgctaaactagctaaagacatttcagcatgttttgtttgctgagctttaagtttagtttctaaatctgtaattgcttgttgaagtgaatcttcatagcgcaatacatcaacattgaagtcgcgtaattgtgaacgcttcgtatagcgtttttcaaaatggcttaatgctttgcgttcatggaaaaatacaccttcagtttcagtagggttatgtaaatcaccttgtttcgggtgtttgataacttgttcaactttaacaagtacatcgtctccattttcttcaacaatcgtgacaccatagctacctgttttgtgtgaaaatcgatatagcttcatgctattttcctcccttaaaagtatgttaatatatatgtatcataacatgaatggagaatataaatggctaactatccacagttaaacaaagaagtacaacaaggtgaaattaaagtggttatgcacacaaataaaggtgacatgacattcaaattatttccaaatattgcaccaaaaacagttgaaaattttgtgacacatgcaaaaaatggttattatgatggaataacattccaccgtgtcattaatgacttcatgattcaaggtggcgatccaacagctactggtatgggtggcgaaagtatttatggcggtgcttttgaagatgaattttcattaaatgcatttaacttatatggcgcattatcaatggctaactcaggacctaatacaaatggttcacaatttttcattgttcaaatgaaagaagtacctcaaaatatgttaagtcaacttgcagatggtggttggcctcaaccaatcgttgatgcatatggcgaaaagggtggtacaccatggttagatcaaaaacatacagtattcggtcaaatcattgatggtgaaactacattagaagatattgcaaatacaaaagtgggaccacaagataaaccacttcatgatgttgtaattgaatctattgatgttgaagaataatatctaaacataattaactaccaacattttaaactcggataaagctaatttatgaatggattagtatatattccaactaaaacaaataaactaacatgataagcaatctcaatatatttatcaagaaagcacagtttttaaatagatgtgtattctaaagataatagttgaggttgctttttatgtttttacaaagaattgctattcaaatagttaataaattgaaaacaaagtagctggatatcatattggtttagataggaatttgttgctgattttatttgtaaatccaagtttgtagaattcttattcatttataaaataatattcgtatgatttgatgttttaattagtccaccatttcgatttgtgctatgataatagtgttaagtaaacgaaataaggggttattaagttgaataactacaaaattggccaacatatcaaggtgcgtgtaactggtattcaaccatacggtgcgtttgttgagacccctaatcatactgaaggactgattcatatatcagaaattatggatgactacgttcataatttgaagaaatttctatcagaaggccaaattgttaaagctaaaattttgtctatagatgatgaaggaaagcttaatctatcattaaaggataatgattacttcaaaaattatgagcgtaagaaggaaaaacaatcagtattagatgaaatcagagaaacagaaaaatatgggtttcaaacacttaaagaacgcttaccaatctggataaaacagtcaaagcgagcaattcgaaacgactaaaggaacagataaatcgtaccgaaaatcatacaaagggtctgaaatgaaagtttcttagactataaaagagattagtatctattaaattttattagatactaatctctttttgtctacgataacgtaatatgattgattctttttacacgtacaaatggtttaaggtgacatatccattatctttgttagatagaatcgtttatttgcaataatgtatgtggatttgtttttttaatttattttagaaataagaactacaacttaaagtattaaacgaattgcaactatataaacagataattggagaatgaaaaaattacatgttatagtcaactcaataattttaaggaggaattaagtaatgaaaagtaaatacgaaccattgtttgataaagtagaattaccaaatggagtagagttgagaaatcgatttgtgttagcccctttaacacatatttcttcaaatgatgatggtactatttcagatatagaacttccttatattgaaaagcgttcacaagatgttggtattacaattaatgctgcgagtaatgtgagtgatgtcggaaaagcatttccaggacagccatcaatcgcgcatgacagtgatattgaaggactaaaacgattagctacagcaatgaagaaaaacggtgccaaagcactcgtacaaatacatcatggcggtgcacaagcattgcctgaattaacacctgatggagacgtcgtagcaccaagtccaatttctttaaaaagtttcggtcagaaacaagaacatagtgctagagaaatgacgaatgaagagattgaacaagcaatcaaggattttggtgaagcaacgcgacgtgcaattgaagcagggtttgatggtgttgaaatacatggcgcgaatcattacttaattcatcaatttgtatcaccatactataatagaagaaatgatgtatgggcaaatcaatataaattcccggtcgctgtgattgaagaagtgcttaaagcgaaagaagcatatggcaataaagactttatagttggatacagattatctccagaggaagcggagtctccaggaatcacaatggaaattacagaggaactcgttaataaaattagccatatgccaatcgactatattcatgtttcaatgatgaatacgcatgcaacgacacgtgaaggtaaatatgctggacaagaaagactgcctttaattcacaaatggataaatggtcgtatgccacttatcggtattggttcaattttcacagctgacgaagctttaggtgcagttgaaaatgttggtgttgacttagtagccattggtagagagctactactggattatcaatttgttgaaaaaattaaagatggacgggaagatgaaattattaattactttgatcctgagagagaagataatcatcacttaactcctaatttatggcatcaatttaatgaagggttctatccattaccacgtaaagataaataagtttttaactgttaccactaatgatattgtgtatgcaatttgttagtggttttcaatatttataaataaaaatattcttagtaaaatatacttttgattaagtgtaaaattatcaattcttttgcttgtaatcatttaagtaattatgtcattataaatgtaagggttttcaaaatagacaaatttaatgaaacttagtgattatttcatcttttttggtggaaaagtatctgctttgaaaactaatgtaattatttggataatgtttcatgtataatagttataaatgatgaaaaggggagatatgatgactaaatctgaaaaaattattgagttaacaaatcattacggagcacataattatttaccattgccaattgtcatttcagaagctgaaggggtatgggttaaagatcctgaaggcaataaatatatggatatgttatctgcatattccgctgttaaccaaggtcatagacatccgaaaattattcaagcattaaaagatcaagctgataaagtgactctagtttcacgtgcttttcatagtgataacttaggagaatggtacgaaaaaatttgtaaactggcaggtaaagataaagctttaccaatgaatacaggtgctgaagcagtagaaacagctttgaaagcagcacgacgctgggcatacgatgttaaaggaattgagccaaataaagcagaaatcattgcatttaatggtaacttccatggtcgaacaatggcgccagtttcattatcatcagaagcagaataccaacgtggttatggtccgttattagatggatttagaaaagttgattttggagatgtagatgcattgaaagctgcaattaatgaaaatactgcagcagttttagtagaaccaattcaaggtgaagcgggtataaatataccgccagaaggatatttgaaagcaattagagaattatgtgatgaacataatgtcttatttattgctgacgaaatccaagcaggattaggtcgttcgggtaaattatttgctacggattgggataatgtaaaacctgatgtctatattttaggtaaagcactaggtggtggtgtcttcccaatttctgttgtattagcagataaagaagtattagatgtctttacacctggctcacatggttcaacatttggtggtaatccacttgcttgtgctgcatcaattgctgcattagatgttatcgttgatgaggatttaccagggcgctctatagaattaggagattattttaaagaacaattaaagcaaattgatcatccatcaattaaagaagtccgtggacgtggtttgtttataggtgtggaacttaatgaaagtgctagaccatattgtgaagctttaaaagaagaaggcttattatgtaaagaaacgcatgatactgtcattcgttttgcaccaccattaattattactaaagaagaattggaccttgcacttgaaaaaataagacatgtatttcaataatgtcaaaaagttgtaacaatcagtttgtaagggctttaaaaaggaatacgttatgttacaatatgtttgaaagcgaaatcattaggtaaagaagaggcgaaaaggatcatgactgagaacaataatttagtaacttctactcaaggaattattaaagaagcattgcataaattgggatttgacgaaggaatgtacgatttaattaaagaacctttaagaatgttacaagtgcgtatccctgtacgaatggatgatggcactgttaaaacattcacaggttaccgtgcgcaacataatgatgctgttggaccaacaaaagggggcgtgcgtttccacccagatgttgatgaagaagaagtaaaagcattatcaatgtggatgactttgaaatgtggcattgttaacttaccatacggtggtggtaagggtggtatcgtttgtgatccacgtcaaatgagcattcatgaagttgaacgtttatcacgcggatatgtaagagcaatttcacaattcgtaggtccgaacaaagatattccagcaccagatgtatttacaaactcacaaattatggcttggatgatggatgaatatagtgcattagataaatttaattcaccaggtttcatcacaggtaaaccaattgtattgggtggttctcatggacgcgacagatcaactgcactaggtgtagttattgcaattgaacaagctgcaaaacgtcgtaatatgcaaattgaaggtgccaaggttgttattcaaggtttcggtaatgccggaagtttcttagctaaattcttatatgatttaggtgcaaaaattgtaggtatctctgatgcttacggtgcattacacgatccaaatggcttagatatagattatttattagaccgtcgtgatagttttggtacggtaacaaatttatttgaagaaacaatctcaaataaagaattgtttgaattagattgtgacattttagtaccagcggctatttcaaaccaaatcacagaagacaatgcacatgatattaaagctagtatcgttgttgaagctgctaatggacctacaacaccagaagcaacacgtattttaactgaacgtggtatattattagttccagacgtattagcaagtgctggtggtgtaacggtttcttacttcgaatgggtacaaaataatcaaggttattattggtctgaagaagaagttaatgaaaagctacgtgaaaaattagaagcggcatttgatacgatttacgaattgtctcaaaatcgaaaaatagatatgagacttgcagcatatatcataggtattaaacgtacagcagaagcagctagatatcgtggttgggcataattaattattatatgtgatttaacgagcttgggacagaaaacaaagccctaagctcgttaattttattttagcaaaagttggttgtaaaacaatgccagtgtaacacgctcttttcaatgcaagttggggtgggccccgaacacagagaaattctaattaaacggtcaacttatatatatttgatcaaaaagacagcagtaggatattttctattcggaaatatcttactgctgtcttttatagtaatagctatatttttgtatttatgttttctagtttaacaatactacttaatgacttctttatatttatcagcaaaatttgtaaagacaccatcaacgccgtatttatttaatcgtaacatatcagctttttcatttactgtataaggatgtactataaatcctaagtcttttaaatgatgggtattttgttcagttaaatctgtataatcaggacctaatccaatcgcataagagcgtatctcttttaagtgttggtcgttaaattgttgtagttcacctttatcaactaattttactaatggcacatgcttattttgacgatgaattttctttaaactttcatcagaaaatgattgaatcattacatgtccattttttaatttattgttatttaaaaggtgatgctttttcaatgaagctaataattgttcttccattcctgggtatacatcaggtgactttgtttcaatataatagtttgcattcggaccataacgttctaaaatttcatctaaagtgggtactttagcatttttataacttgctcttgcgtattttggatattttttattaaaccaacttcctgcatctaactgttttaattcatcaagggtataatcctcaactttaccgtgtccatttgttgtacggttaactgtttcatcatgcatagcaactaaatggccatctttggtacgttgtaaatcaatttcgatatacgatgcttttaactcattatgactcttatcatatgcttgaaacgtatgctcgggtgcatagccacttgcgccacgatgtgcgatagtagtgaatcgctcattcgttaaatttgtatgccattgaatagcctgaggtttatttgcaatttgatttgtttgttcagcgccagcagtaggtactgataaaaatcccatagtaaaaacagcagaagcagccataaatttagtgaagcttttcgaagagttagtcatagtctttatcctttcatctctttatttgtagtctaacaattttaaaatactacaaaaacctgcttgtgaaaacgctttacacatttcttttacaatttataacatttctgtaatataaatttaaaagaattatcaaacattttagtaatcttaaaaatgtgatgttcaataagacgaagagagcattaaaatacccacaatgtaattttcatagacattgtgggtaggtagattaacgtatttattgtgatagtaattgtttagcaacatcaagttgttgtttgaccgatgattgacctgtagaaccgtaactttgacgtcgttttaagcaattttcaggctgcaaataatcgtaaatatcggcatcaatactagaatgatgttgttgatatgttgctaaaggtacatctaataaataatgaccttgttgtatacattctaagacgatttttcctacaatttcatgtgcagttctaaatggaatatttttagttactaaataatctgctagttccgttgcatttgaaaaatcttctttaacagtttgattgagtcgttctttattaattgtcatcgtttgaatcataccttcgaaaatacgtaaagaacctttaattgtatggacagcatcgaataaaccttctttatcttcctgcatatctttgttatatgctagaggtaatccttttaaagtcataagcatgctcattaaatgaccagtcgttcgaccaactttacctctaattaattctgccatatcaggatttttcttttgtggcataatagatgagccagttgaaaatgcatctgataatgtaatgaatttagcttcgtctgtggaccagaaaataatttcctctgcaaagcgtgataagtgaaccatcgttaaagaaatattatgcaatgtttcaataatatagtctctgtcactaacagcatctaggctattctcatagagactgccaaagttcaacaatgttgttgtctcgtgtctatcgatagggtatgtggtaccacttaaggctgctgcacctaaaggattaatatcgattcgttttaaactatcttcaaatcgttgtcggtctcgttgtaacatccaaaaataagtcataatatgatgtgcaaatgaaattggctgtgcacgctgtaaatgagtataaccaggcataattgtatcaacattattggaagcgatgtctacaattacactttgtaacgacttaattaatgcgatgatatcttgcacttgtttcttagtgtacaagtgcatgtctgttgcaacttgatcgtttctactgcgtccagtatgcaacttaccaccagcatcacctatacgtttaattaattcatgttcaatatttaaatgaatatcttctaatgatgcactaaattgaatttgatcttgatgataatcatgttgaatagattttagtccttgtataatttgttcgctgtcttgttggctaataatgccttgattcgcaagcatagttgcatgcgcaatgctgccttcgatatcttgatctatgagcgtttgatcaaaagtaatggatgcgttaaagtcgtcaacccactcttcaggttgtacttcaaatctaccgccccaagctttattgctcattgctatagcctccatgtaacatcgcatttacttgagtaggtaaaccatagatatcgataaagccaacagcagcgtcttgattaaatgcatcttcttttgtataagttgctaatttttcatcatataatgtgtaaggtgattttctaccattaacgatggcattacctttgaataatttaattctgacatcaccacttacgtattgctgagtactatcaataaataatttcaaactatcagttaaaggtgagaaccaaagtccattgtatagttgttcagcaaattgcttctcaatgattggtttaaagtgtgcgacatctttcgttaacgtaatcgtttctaatgctttatgcgcttttaaaataacttctgcagcaggtgcttcataaatttctcttgatttgatacctacaagtctattttctacatggtcaattcttccgataccatgcttaccagctaatgcattcaacgttaaaattaaatcgtctaattcatattttttgccatcaatttgaactgggatacctttatcaaacgttaaaatgatttcatcagcagtatctggtgtttcttctaaagcatttgttagatcgaacgcatcctctggtggcgcagcataaggatcttctaaaataccacattcattcgctctgccccataggttttgatctatagaataaggtgaatcatggttgattgatacagggatattatgtttaattgcataatcaatttcttcttcacgactccatgcccactcacgtacaggtgcgaatgctttcaatgatgggtttaatgctttaatggcaacttcgaaacgtacttggtcattccctttaccagtacaaccatgtgcaatacctactgaatttgttttctcagcaatctctactaattttttagcgattaatggtcttgataaagcagaaactaatggatatgcattttcatacattaaatttcctttgattgcataacttacatactcatcactaaattcttttgttgcatcaataatatgacattcaacagctcccatatctaaagcttttttataaacgatgtctaaatctttaccttcaccaacatctaggcaacaagctacaacgtcgtatcctttgtcgataagccattgaacggccacacttgtatctagtcctcctgaatatgctaaaacaattttctctttcataaaattcacctcattgtagttatctgaatatttcgtatgaacacatgatagcaaacttttaatgaaaataaaaccattattttacatatttattcataaaatatgatagaggtagttagagttgtaagtataaatgcttatttatcaatgtttaaaagtgttttaaaaaacatgcaaattgtataaaaaatgtttgagtgtttgatgccagtttgaaatgtttgttgaaaaataggtgtgaaacgtcacataaatatcaattttattgattaagtacaaacttgtgaattgaatcgcaaacgtaaacttagtaaaattaagatattaaatgaaacaggaggcttttatagatgactcatattcaattagattttagtaaaacgttagaatttttcggtgaacacgaattaaaacaacaacaagaaattgttaaatcaattcacaaaacaattcatgaaggtactggtgcaggtagtgacttcttaggctgggttgatttaccagttgattacgacaaagaagaattttcaagaattgttgaagcatcaaaacgcattaaagaaaattctgatgttttagtagtcatcggtattggtggttcttatttaggtgcacgtgcagcaatcgaaatgttaacgtcatcatttagaaacagcaatgaataccctgaaattgtatttgttggtaatcacttatcatcaacatacactaaagagttagttgattatttagcagacaaagatttctctgtaaacgttatttctaaatctggtacaactacagaaccagcagttgcatttagattgttcaaacaattagttgaagaaagatacggtaaagaagaagcacaaaaacgtatatttgcaacaacggataaagaaaaaggtgctttaaaacagttggctacaaacgaaggttatgaaacgttcatcgtacctgatgatgtaggtggaagatattctgttttaacagcagtaggattattaccaattgcaacagctggaattaacatcgaagctatgatgattggtgctgcaaaagcacgtgaagaattatcttcagataaattagaagaaaacattgcataccaatatgcgacaattcgaaacattttatatgcaaaaggttatacaacagaaatgttgattaactatgaaccatctatgcaatactttaatgaatggtggaaacaattatttggtgaatcagaaggtaaagacttcaaaggtatctatccttcaagtgccaactacacaactgatttacattctttaggtcaatatgtacaagaaggccgtcgtttcttattcgaaacagttgtaaaagtaaatcatcctaaatatgatattactattgaaaaagatagtgatgatctagacggattaaattatttagctggtaaaacaatcgacgaagttaacacaaaagcattcgaaggtacattattagcgcatactgatggtggtgttcctaacatggtacttaacattccacaattagatgaagaaactttcggttatgtcgtatacttcttcgaacttgcttgtgcaatgagtggataccaattaggcgtaaatccatttaaccaacctggtgtagaagcatataaacaaaacatgttcgcattattaggtaaacctggttttgaagacttgaaaaaagaattagaagagcgtttataaaatacattacttcaatgattagtgatctataaaatggtataaatatagagctgaatattaagttcattgataaaaatgaaaaggcaatttctatttagagttatttaaatagaagttgtctttttatattattaaaaattttgattggtatagaattaggttacatgtttttattattagataactatatttataggagtcggttagtatgaatacaagtttgtttttaataattgctgtttttagtgttttgttgacgatgataatttctataaatgaaaagcataaaaaataaacattgtacatcgaagtgtatattaaagaaatagtgatgaaagagattaattatattacttgttcgaagtgatggtaagttttgtgatatttaattagcacctataatttacactgtaaaagaaactttaaagagaggtttatgttggaaagtttatatagaaaaatacagatagtattaatattattaacagcagttgtttgttttaatgggttattaaatactaatgtaacgttaaaatcgaatataaatatttttgtttttagtggcatattgttattggcttttatttgttgggcttatgttaaacttaacaaatttaagtaatggatgggcaatggattagaaaagcaatgagaaattttaaaatataaagtgcaagtattcaacgacagtaagtgtctgagatatataaaggtcctaggctcgtttgctacgtttagacaaatacttaagacgaagaatgttaagagaaaattaaagataaaataatatctgccatacaataatattgttatactactagagactgatttattagcatgattacatgttaatgtttctttacttagtaattaactttataatgtaagaataattatcttcagccaaagaaagggattgatgatttgtcgtttcatcaagtagaagaatggtttgagatatttcgacagtttggttatttacctggattcatattgttatatataagagcgattattccagtatttccattagcactctatattttaattaatattcaagcctatggacctattttaggtatattgattagttggcttggattaatttctggaacatttacagtctatttaatctgtaaacgattggtgaacactgaaaggatgcagcgaattaaacaacgtactgctgttcaacgcttgattagttttattgatcgccaaggattaatcccattgtttattttactttgttttccttttacgccaaatacattaataaattttgtagcgagtctatctcatattagacctaaatattattttattgttttggcatcatcaaagttagtttcaacaattattttaggttatttaggaaaggaaattactacaattttaacgcatcctttaagagggatattaatgttagttgtgttgattgtattttggattgttggaaaaaagttagaacagcattttatggggtcgaaaaaggagtgacatcgtgaaaaaagttgtaaaatatttgatttcattgatacttgctattatcattgtactgttcgtacaaacttttgtaatagttggtcatgtcattccgaataatgatatgtcaccaaccctgaacaaaggggatcgtgttattgtaaataaaattaaagttacatttaatcaattgaataatggtgatatcattacatataggcgtggtaacgagatatatactagtcgaattattgccaaacctggtcaatcaatggcgtttcgtcagggacaattataccgtgatgaccgaccggttgacgcatcttatgccaagaacagaaaaattaaagattttagtttgcgcaattttaaagaattagatggagatattataccgcctaacaattttgttgtgctaaatgatcatgataacaatcagcatgattctagacaatttggtttagttgataaaaaggatattattggtaatataggtttgagatattatcctttttcaaaatggacgattcagttcaaatcttaaaaagaggtgtcaaaattgaaaaaagaattattggaatggattatttcaattgcagtcgcttttgtcattttatttatagtaggtaaatttattgttacaccatatacaattaaaggtgaatcaatggatccaactttgaaagatggcgagcgagtagctgtaaacattattggatataaaacaggtggtttggaaaaaggtaatgtagttgtcttccatgcaaacaaaaatgatgactatgttaaacgtgtcatcggtgttcctggcgataaagtagaatataaaaatgatacattatatgtcaatggcaaaaaacaagatgagccatatttaaactacaatttaaaacataaacaaggtgattacattactgggactttccaagttaaagatttaccgaatgcgaaccctaaatcaaatgtcattccaaaaggtaaatatttagttcttggggataatcgtgaagtaagtaaagatagccgtgcgtttggcctcattgatgaagaccaaattgttggtaaagtttcatttagattctggccattcagcgaatttaaatataatttcaatcctgaaaatactaaaaattaatatgaaacaaatacaacatcgtttgtcggttttaatactgataaacgatgttttattttgttagtaccacaataaaagctacgttcgaaatgaacttataataaatcaatcacaatcactttgtgttaaaatatgtgtcaaaggaagtgagggtttgtcatgacattacatgcttatttaggtagagcgggaacaggtaagtctacgaaaatgttgaccgaaataaaacaaaaaatgaaagcagatccgcttggagatccaatcattttaattgcgccaactcaaagtacatttcaattagaacaagcctttgtcaatgatccggaattaaatggtagtttaagaacagaagtgttgcattttgaacgattaagtcatcgtattttccaagaagttggtagttatagcgaacaaaagttatctaaagctgcaacggaaatgatgatttataacattgttcaagaacaacaaaagtatttaaaactttatcaatcacaagcaaaatattatgggtttagtgaaaaattaacagaacaaattcaagattttaaaaaatatgcagtaacgcctgaacatttagaaagctttattgctgataaaaatatgcaaactcgaactaaaaataagttagaggatattgctttaatataccgagagttcgaacaacgcattcaaaacgagtttattacgggtgaggatgcattacaatattttattgattgtatgccgaaatcagagtggctaaaacgtgctgatatatatattgatggttttcacaacttttcaacgattgagtatttaataatcaaaggattaattaaatatgcgaagagtgtcacaattatattgacgacagatggtaaccacgatcaattcagtttatttagaaaaccatcggaagtgttacgacatattgaagaaatagcaaatgaactcaatatttctattgaacgtcaatatttcaagcaatcatatcgctttaataatcaagatttaaagcatcttgaacaagaatttgatgcacttcaaatcaatcgagtggcatgtcaaggtcatatcaatattttagaatctgcgactatgagagaggaaataaatgaaattgcacgacgtatcatcgttgatattcgtgataagcaattacgatatcaagatattgctattttatatcgtgacgagtcttatgcttatttatttgattccatattaccgctttataatattccttataacattgatacaaagcgttcgatgacacatcatccggtcatggaaatgattcgttcattgattgaagttattcaatctaattggcaagttaatccaatgctacgcttattgaagactgatgtgttaacggcatcatatctaaaaagtgcatacttagttgatttacttgaaaattttgtgcttgaacgtggtatatacggtaaacgttggttagatgatgagctatttaatatcgaacattttagcaaaatggggcgtaaagcgcataaactgaccgaagatgaacgtaacacatttgaacaagtcgttaagttaaagaaagatgtcattgataaaattttacattttgaaaagcaaatgtcacaagcagcaactgtaaaagactttgcaactgctttttatgaaagtatggaatattttgaactgccaaatcaattgatgacggagcgagatgaacttgatttaaatggtaatcatgaaaaggcggaagaaattgatcaaatatggaatggcttaattcaaatcctcgatgacttagttctagtatttggagttgaaccaatgtcgatggaacgtttcttagaagtatttgatattggtttagaacaattagaatttgttatgattccgcaaacattggatcaagttagtattggtacgatggatttggctaaagtcgacaataagcaacatgtttacttagttggaatgaatgatggtacgatgccacaaccagtaactgcgtcaagcttgattacagatgaagaaaagaaatattttgaacagcaggctaatgttgagttaagtccaacatcagatattttacagatggatgaagcatttgtttgttatgttgctatgactagagctaagggaaatgttacattttcttatagtctaatgggatcaagtggtgatgataaggaaatcagcccatttttaaatcaaattcaatcattgttcaaccaattggaaattactaacattcctcaataccatgaagttaacccattgtcactaatgcaacatgctaagcaaaccaaaattacattatttgaagcattgcgtgcttggttagatgatgaaattgtggctgatagttggttagatgcttatcaagtaattagagatagcgatcatttaaatcaaggtttagattatttaatgtcagcattaacgtttgacaatgagactgtaaaattaggtgaaacgttgtctaaagatttatatggtaaggaaatcaatgccagtgtatctcgttttgaaggttatcaacaatgcccatttaaacattatgcgtcacatggtctgaaactaaatgagcgaacgaagtatgaacttcaaaactttgatttaggtgatattttccattccgttttaaaatatatatctgaacgtattaatggggattttaaacaattagacctgaaaaaaataagacaattaacaaatgaagcattggaagaaattttacctaaagttcagtttaatttattaaattcttcagcttactatcgttatttatcaagacgcattggcgctattgtagaaacaacactaagcgcattaaaatatcaaggcacgtattcaaagtttatgccaaaacattttgagacaagttttagaaggaaaccaagaacaaatgacgaattaattgcacaaacattaacgacaactcaaggtattccaattaatattagagggcaaattgaccgtatcgatacgtatactaagaatgatacaagttttgttaatatcattgactataaatcctctgaaggtagtgcgacacttgatttaacgaaagtatattatggtatgcaaatgcaaatgatgacatacatggatatcgttttacaaaataaacaacgccttggattaacagatattgtgaaaccaggtggattattatatttccatgtacatgaacctagaattaaatttaaatcatgggctgatattgatgaagataaactagaacaagatttaattaaaaagtttaagctgagtggtttagtgaatgcagaccaaactgttattgatgcattggatattcgtttagaacctaaattcacttcagatattgtaccagttggtttgaataaagatggctctttgagtaaacgaggcagccaagttgcagatgaagcaacgatttataaattcatccaacataacaaagaaaattttatagaaacagcttcaaatattatggatgggcatactgaagttgcaccattaaagtacaaacaaaaattgccatgtgctttttgtagttatcaatcggtatgtcatgtagatggcatgattgatagtaagcgatatcgaactgtagatgaaacaataaatccaattgaagcaattcaaaatattaacattgatgatgaatttgggggtgagcaatagatgacaattccagagaaaccacaaggcgtgatttggactgacgcgcaatggcaaagtatttacgcaactggacaagatgtacttgttgcagccgcggcaggttcaggtaaaacagctgtactagttgagcgtattatccaaaagattttacgtgatggcattgatgtcgatcgacttttagtcgtaacgtttacaaacttaagtgcacgtgaaatgaagcatcgtgtagaccaacgtattcaagaggcatcgattgctgatcctgcaaatgcacacttgaaaaaccaacgcatcaaaattcatcaagcacaaatatctacacttcatagtttttgcttgaaattaattcaacagcattatgatgtattaaatattgacccgaactttagaacaagcagtgaagctgaaaatattttattattagaacaaactatagatgaagtcatagaacaacattacgatatccttgatcctgcttttattgaattaacagagcaattgtcttcagatagaagtgatgatcagtttcgaatgattattaaacaattgtatttctttagcgttgcaaatccaaatcctacagattggttggatcaattggtgacaccatacgaagaagaagaacaacaagcgcaacttattcaactactaacagacttatctaaagtatttatcacagctgcctatgatgctttaaataaggcgtatgatttgtttagtatgatggatggcgtcgataaacatttagctgttatagaagatgaacgacgtttaatggggcgtgttttagaaggtggctttattgatataccttatttaactggtcacgaatttggcgcgcgtttgcctaatgtaacagcgaaaattaaagaagcaaatgaaatgatggtcgatgccttagaagatgctaaacttcagtataaaaaatataaatcattaattgataaagtgaagagtgattacttttcaagagaagctgatgatttgaaagctgatatgcaacaattggcgccacgagtaaagtaccttgcgcgtattgtgaaagatgttatgtcagaattcaatcgaaaaaagcgtagcaaaaatattctggatttttctgattatgaacattttgcattacaaattttaactaatgaggatggttcgccttcagaaattgctgaatcataccgtcaacacttccaagaaatattggtcgatgagtatcaagatacgaaccgagttcaagagaaaatactatcttgcatcaaaacgggtgatgaacataatggtaatttatttatggttggagatgttaagcagtccatttataaatttagacaagctgatccaagtttatttattgaaaagtatcaacactttactatagatggagatggcactggacgtcgaattgatttgtcgcaaaacttccgttctcgaaaagaagtactgtcaacgacaaactatatattcaaacatatgatggatgaacaagtcggtgaagtaaaatatgatgaagcggcacagttgtattatggtgcaccatatgatgaatcagaccatccagtaaacttaaaagtgcttgttgaagcggatcaagaacatagtgatttaactggtagtgaacaagaagcgcattttatagtagaacaagttaaagatattttagaacatcaaaaagtttatgatatgaaaacaggaagctatagaagtgcgacatacaaggatatcgttattctagaacgcagctttggacaagctcgcaatttacaacaagcctttaaaaatgaagatattccattccatgtgaatagtcgtgaaggttactttgaacaaacagaagtccgtttagtattatcatttttaagagcgatagataatccattacaagatatttatttagttgggttaatgcgctccgttatatatcagttcaaagaagacgaattagctcaaattagaatattgagtccaaatgatgactacttctatcaatcgattgtaaattacattaatgacgaagcagcagatgctattttagttgataaattaaaaatgtttttatcagatattcaaagttaccaacaatatagtaaagatcatccggtgtatcagttaattgataaattttataatgatcattatgttattcaatactttagtggacttattggtggacgtggacgacgtgcaaacctttatggtttatttaataaagctatcgagtttgagaattcaagttttagaggtttatatcaatttattcgttttatcgatgaattgattgaaagaggcaaagattttggtgaagaaaatgtagttggtccaaacgataatgtcgttagaatgatgacaattcatagtagtaaaggtctagagtttccgtttgtcatttattctggattgtcaaaagattttaataaacgtgatttgaaacaaccagttattttaaatcagcaatttggtcttggaatggattattttgatgtggataaagaaatggcatttccatctttagcttcggttgcatatagagctgttgctgaaaaagaacttgtgtcagaagaaatgcgattagtctatgtagcattaacaagagcgaaagaacaactttatttaattggtagagtgaaaaatgataaatcgttactagaactagagcaattgtctatttctggtgagcacattgctgtcaatgaacgattaacttcaccaaatccgttccatcttatttatagtattttatctaaacatcaatctgcgtcaattccagatgatttaaaatttgaaaaagatatagcacaagttgaagatagtagtcgtccgaatgtaaatatttcaattatatactttgaagatgtgtctacagaaaccattttagataatgatgaatatcgttcggttaatcaattagaaactatgcaaaatggtaatgaagatgttaaagcacaaattaaacaccaacttgattatcaatatccatatgtaaatgatactaaaaagccctcaaaacaatctgtttctgaattgaaaagacaatatgaaactgaagaaagtggcacaagttacgaacgagtaaggcaatatcgtatcggtttttcaacttatgaacgacctaaatttctaagtgaacaaggtaaacgaaaagcgaatgaaattggtacgttaatgcatacagtgatgcaacatttaccattcaaaaaagaacgcatatctgaagttgagttacatcagtatatcgatggattaatcaataaacatattatcgaagcagatgcgaaaaaagatattcgtatggatgaaataatgacatttatcaatagtgagttatattcgattattgctgaagcagagcaagtttatcgtgaattaccgtttgtagttaaccaagcattagttgaccaattgccacaaggagacgaagacgtctcaattattcaaggtatgattgacttaatctttgttaaagatggtgtgcattattttgtagactataaaaccgatgcatttaatcgtcgccgtgggatgacagatgaagaaattggtacacaattaaaaaataaatataagatacagatgaaatattatcaaaatacgcttcaaacgattcttaataaagaagttaaaggttatttatacttcttcaaatttggtacattgcaactatagtattttgattttcaaaagaataaaaaataatttcgattaagtgcaaagtccttgtagcagaatgaacacaactcattttcaaaattgtcttacttatttatttgttatttgataacgaaaaaagttataatgtgaattaagataaagatgaggagttgagaatgaatgaaattcttatcattcaagtataatgacaaaacttcatatggcgttaaagtaaaacgcgaagatgctgtatgggatttaacacaagtattcgctgactttgcagaaggagatttccatcctaaaacattgttagctggtttacaacaaaatcatactttagattttcaagaacaagtacgtaaagcagttgtagcagcagaagatagcggcaaagctgaagactataaaatttcatttaatgacattgaatttttaccaccagtaacacctccgaataatgtgattgcttttggtagaaattacaaagatcatgcgaacgaattaaatcatgaagtagaaagattatatgtatttacaaaagcagcgtcatctttaacaggagataatgcaacaattccaaatcataaagatattactgatcaattagattatgaaggtgaattaggtattgttattggtaagtctggtgaaaagattccaaaagcattagctttagattatgtttacggctatacaattattaacgatatcactgatcgcaaagcgcaaagtgaacaagatcaagcatttttatcaaaaagtttaactggcggttgcccaatgggtccttatatcgttactaaagacgaactaccattacctgaaaatgtaaatattgttacaaaagttaacaatgaaattagacaagatggtaacactggcgaaatgattcttaaaattgatgaattaatagaagaaatttcaaaatatgttgcactacatccgggagatattattgcaactggtacaccagcaggcgttggtgcaggtatgcaaccacctaaattcttacaaccaggtgatgaagttaaagtgactattgataatattggaacgctgacaacttatatcgctaaataattatcatttaaaaagctaaccagtctttatatagattggttagttttttcttgcttttctaaaaaggtgttaaagatcattgtttataatgttaccattttgagacgaaagtgaaatatgatattaagaagtagttgattattttacagcagatgcacaatattctaataagtaataaaatgtcatgttcttcctctcaaatatagaagtgtggtaaaatatgtatttgtgtatgaacaaataatgattaaattataagaaagtgggtatttatcccacgaagttttaatttaataactaaaattattaaagtgggggaattaatatgttacatttacatattttaagttgggtattagcaatcattttatttatcgctacatacttaaatatttcaaaaaatcaaggtggtacgccatatttcaaaccattacatatggtactacgattatttatgctgttgacgttaatttcaggattttggatattaattcagtcatttatgaatggtggggcaaatcatatgttgcttacattgaaaatgctgtgtggtgttgcagtagttggattgatggaagtgtcgattgctaaaagaaagagacatgaacaaagtcacacaatgttttggataacaattgcattaattatcatcacaatggtattaggtgtcattctaccgttagggcctatatcaaaattattcggtattggctaattgataagacatatagtatatgacataaggcatggacaattattagtccaagaccttatgtcttttttgattctaaaaatgtttaaacaaaaaaatggactggatagtaataccagtccaacataattctaacctagacaattaagattagattgaatcgcatgattcatttatttagctttgtaaccaatcatattgattaaatctttagggtgactatatggtggtgcataagccacttcaaactcagttaactcatctacagttagctggttcatcattgccatcgatagtacatcaatacgtttatctgcgccttcttttcctactgcagctgctcttaaaatctgacggtttgaagtgtcataatatactcttaagtgtaaaggggaatttcctgggtaataattcgcgtgtgcaccttgagtgacttccaccattttatagtcaaattgctttagttcgtttggtttaacgccgacactcgcaaatgtataatcaaagaacttcacaatattgttgcctaagaagcctttgaattcaatagtgtcatttccagcaatttgttcggcaacaatacttgctgcacggtgagcgccccaagctaaaggaacactagccggtagatcgacatgtcgataatgtgatgttgcaatatcgcctattgcataaatgtttggaacatttgtttcaaatttatcgtttaccggtatgaacccttttcgatcaagtttgatatttgaactttcgataaattttgaattggggtgagtaccgacaccttcaataatcatatcgtaatgttcaacttttcctgatttaaatgtaatttcatttccattgatagcatcaatttcctcatttaaacggtatggaatctctcgcttatctaattcatcaagtataggttgattcatgtcggcatccattaatttatttatcttatcagatcgatgaattaaagtagggtgtaaaccacgttcataaagattttcaagaacttctaatgaaacataccctgcacctacaaccaatactttatcaacttgatttgctttgatgaattgattgatagcatcagtgtcttctaaatttctaagtgtaaatgtaatatcactttcaaagccaaggctatttgcacttgcaccagggcttaaaatgagtttatcgtaagattcttcaaattgttcgttggtctttctatttaatacagatacagtttgtctttcatcattgattgcaataacttcatgataagtttttactgtaatttgctttctatcataaaatttttcaggtgtatatgctaaagcatattttctatcttcaacaacttcgccaatgacataaggcaatgcacaattagcaaagctcatatcacgatctttttcaaaaataataatgtcactttctttatctaaacgtcgaatttggctggcacatgtagcaccgccagcgactgctccgactacgactattttgggcatcgtaacttacctcctattgttttaaaatattataaaatgattagttataaattaacagtaatatctaatatttaaattaaagaaatcattcaaatatcgaccaatgccatcttcattattgttgaatgtaatattgttcgctacatctttaagttcttgcaaaccattttccatagcaacaccatggcgggcgtactcaatcatttctatatcattatcttcatcaccgaatgcaataatattatttcggtcaatatttaaaaattgtctaacttgttcaatacctcttgctttattaataccaagttttacaatttcaatgacagggaatggtgcgccccagcgtcgatgctcaatatgatcggcataaaaatgagtaagcatatttttgatttcaggtattttactttcttcggcttcaattaaaattgaggtaggggattctttcaagtggacaagtaaattaccagtttgaattcttggattacccattgaaaaaccttcaaataatcttggatcatgattgttaatgaaaacataatctttcacttctgcaataatattcgatacttgatattgttgtaatccttgaataatattttgtgcgatgcctaaatctaaaatttcatggcaagttttgaagtttttatctttagggtgatgtacgtaagcgccattaaaattaacaattggtgtcgttaaatttaattcatgataatacatttgacttgcacgataaggtctgccagtcgcaatcataatttggtgtccacgttgttgtaattcatttaatacttgtttagtatatgatgaaatttctttgttatcgtttaataatgttccgtctaagtctagacatattaaatgtggttgcatatctctcctcataagttgcttagttcatatagatacatcatagcattttattggcgttttgtcggatatttgatatattatgaataatatgacattaaagaggtgatatggatggaagaggcattgaaagatagtatcttaggtgcattagaaatggtaattgaccctgaattaggaattgatatcgttaatttaggtttagtatacaaagtgaatgttgatgatgaaggcgtatgtacagttgatatgactttaacatcaatggggtgtccaatgggacctcaaattattgatcaagttaaaacagtattagcagagattcctgaaattcaggatactgaagtgaatatcgtatggagtccgccttggacaaaagatatgatgtcacgttacgctaagattgcacttggtgtgagctaacataaacttgcattgcctgtagaaattggaaatccaattggggctctgctcccaacttgcattgcttgtagaatttcttttcgaaattctctgtgttggggccccgcagtcaatataacattgtagagtataattcattgtgaatgagctcccttcaaagtagacattgaagggagccttatttacgttctaggttctgattttattttgaaaatttataactaacttgtttcagaaaatatgaataaagacagtgactcgcacttctaagagtgcacaattcatttcctagtcgaatattttcttgaaaatttctataataaattgaatttatattacatttatattacaatacataatacttcatagtttttaagttgccgagttgcattacaaattggatttcgaaataagaatcatcattggtaattttttaatttaacagtattttagtcaatatgattttgatggtgtcgtaattcaataatatacatatgcatttcaatattcttttaaatagcataactaaatttaattaagcatctaagaagaacagttttaaaagggaagaatgcaaaaatgaacaaaacaaagggttttacaaaatataagaaaatgagatatatgccagggctcgatggtttgagggcaatcgctgttctaggaattattatttaccacttaaataagcaatggttgacaggtggctttttaggtgtggatacattttttgtgatctctggttatttaattacaagcttattactcaaagagtatgatgacacaggtatcattaaattgaaaagcttttggatacgtcgtttaaaacgtttattaccagcagtcatagttttattaatggttgtagggacagcaaccttattattaaaatcagataatatcattagggttaaacatgatattatagctgcgatattttatgtatcaaactggtggtatatagcaaaagatgttaattattttgagcaattttcatttatgccattaaagcatttatggtctttagcaattgaagaacagttttacatatttttcccagttattttggttacattattgttaacaattaaaaagcgatacaaaataggatttattttttggggagtatctataatttctttagggttaatgatgtttatctacagtattaatggggatcattcacgagtgtattttggaacagatacaagattacagacattgttactgggtgttattttagcttttttatggccaccgtttaaattgaaaaatgatccacctaaagttgtaaaatatgttattgatagcataggtagtttatcatttatagtacttatattattatttttcattattaatgatgagatgaattggatatatgatggtggtttctatttaatatccatattaacgttatttattattgccagtgtcgttcatccatctacatggatagcgaagatattttcaaatccagtgttagtatttatcgggaaaaggtcttacagtttatatttatggcattttgcagtaattagtttcgtacatagttactatgtagacggacagatacctgtatatgtgtactttatagatataagtttaacaattatatttgcagagctatcatatcgctttatagaaactccatttagaaaagaaggtattaaagctttaaattggcgaccttgttatataccacaatttataagaatggcaattgtagtaaccttgttaattccatttatgttgattttattaggtgcattcaataaatatggtaaagacattataggagaaaaagcgaatagctttgataccactattgaagataattatttaatgcggatagcaccaattgataacattcacattgatggcttagtaagtgagaagaaaaaggaatcttccgacgtatataataatattaaacctcttttaatcggtgattcagtaatggttgatatcggtgagtcatttaagtcatcagttcctaagtctagaattgatggaaaagtagggcgtcaattgtatcaaaccttacctttagttaaagcgaattattcacaatataaaaaatcatctgatcaagtcgtattagaattaggtacaaatggcgactttactgtcaaacagctcgacgatttacttaatcaatttggtaaagccaagatttatttagttaatacacgtgttccaagaatttatgaggcaaatgtaaatcgattattagctgacgcggcgaaacgaaagtccaatgtcacattaatagattggtataagcgatcacaaggacatagtgaatattttgcaccagacggtgtacatttagagtacaaaggagttctagctttaaaagatgaaatattaaaagcacttaaaaagaaataacatatgtttaataagtctagttaatgtgtaacgtaacattagctagatttttttaattcaaaaatttatttacaaatattaggaaatttaagtgtaaaagagttgataaatgattatattgggactataatataattaaggtcaaagaaagtcaaagtcaaaagtgcaacttgaccaactctacaaattagaggtgaaattaatggatataaataaaatgacatatgctgttcaaagtgctttacaacaagcagttgaactgagtcagcaacataaattacaaaatatagaaattgaggcaattttaagcgctgccttaaatgaaagtgaaagcttatataaaagtattttagaacgagcaaatattgaggtagatcaattaaaaaaagcttatgtagacaaactaaacacgtatgcatctgtagaaggtgacaatatacaatatggtcaatatattagccaacaagcaaaccaattgataactaaggctgaatcatacatgaaagaatatgaagatgaatatatttcaatggagcatattttacgttcggcaatggacattgatcaaacaacaaaacattatataaataataaagtagaagttatcaaagaaattattaaaaaagtaagagggggaaatcacgtgacatcacaaaatccagaagttaattacgaagcattagctaaatatggccgcgacttagtagaagaagttagacaaggtaaaatggatcctgttataggaagagatgaagaaattcgaaatacgattcgtattttaagtcgtaaaactaaaaacaaccctgtgctcattggtgaaccaggtgttggtaaaactgcaattgttgaaggattagcgcaacgtatagttaagaaagatgtgccagaatcattattagataaaactgtttttgagttagatttaagcgcattagtagcgggcgctaaatatcgcggtgaatttgaagagagattaaaagcagtcctaaaagaagttaaagagtctgatggtagaattatattatttattgatgaaatccatatgcttgtaggtgctggtaaaacagatggtgccatggatgcaggcaacatgctaaaaccaatgttagcacgaggagagttacattgtattggtgcaacaactttaaatgaatatcgagaatatattgaaaaagattcggcattagagcgtcgtttccaaaaagtagcagttagtgagcctgatgttgaagatacaatttcaattttacgtggtttaaaagaacgatatgaagtgtatcatggtgtacgtattcaagatagagccttagttgctgccgctgaattgtctgatcgttacatcactgatcgttttttaccagataaagcgattgatttagttgaccaagcatgtgcaacaattcgtacggaaatgggatcaaatccaactgaattggatcaagttaatagacgtgtcatgcaattagaaattgaagaaagcgcacttaaaaatgaatctgacaatgcgagcaaacagagattacaagaactacaagaagagcttgctaatgaaaaagagaaacaagcagcacttcaatctcgtgtagaatcagaaaaagaaaaaatagcaaatttacaagaaaaacgtgcgcaactagatgaaagtagacaagcgttggaagatgcacaaacaaataacaatttagaaaaagcagctgaactacaatatggaacaattcctcaattggaaaaagaacttagagaattagaggataatttccaagatgagcaaggtgaagatacagatcgaatgattcgtgaagttgtaacagacgaagaaattggcgatattgtcagccaatggacaggcataccagtttcaaaattagttgaaacagaacgtgaaaaattacttcacttaagtgatatcttgcataaacgtgttgtaggtcaagataaagcggttgacctggtttcagatgcagtagttagagctagagcaggtattaaagatccaaacagacctattggtagtttcttattcctaggtcctactggggtaggtaaaactgaattagctaaatcattagctgcatcattatttgattctgaaaaacatatgattcgtattgatatgagtgaatatatggaaaaacatgcagtatcaagattgataggtgcacctcctggatatattggacatgatgaagggggtcaattaactgaagcggttcgtcgtaatccatactcagttattttattagatgaggttgaaaaagcgcatactgacgtctttaatgtattattgcaaattttagatgaaggccgtttaactgattctaaaggacgtagcgttgattttaaaaatactattattattatgacaagtaatattggatctcaagttttattagaaaacgtaaaagagactggtgaaattacagaatcaacagaaaaagctgttatgacaagtttaaatgcatatttcaaaccagaaattttgaatcgtatggatgacatcgtattatttaaacctctatctattgatgacatgagtatgattgtagacaaaatattaacgcaattaaatataagattactagaacaacgaatctcaattaaagtttctgatgatgctaaagcttggttaggtcaagaagcttatgaacctcaatacggtgcaagaccattaaaacgttttgtacaacgccaaattgaaacaccattagcacgtatgatgattaaagagggattcccagaaggtacaacgattaaagttaatttaaattcagataataacttaacgtttaatgttgaaaaaattcatgaataaaattgaaccaagaatgtgatgattaatcgcattcttggttttttagatttgaaatttattataattgttcattggcaatatactttttaaatgatctaataaacgccaatatttctggactttcttttttgctgtatatatatgtaaatgaaataggtgcttgtaaaattttcgtgttaataatcgaaatattgtaatcactatttgttgttatataaataggcaggaatgatataccttgattcatttcgattaatttaattgaagtatgcacatcattgatagatagaaattgtgctttttcataaatatttaaaatattatttttaagtgatgaccaatattctggatggttatcacttattattttgtatttttcaaataaagatgcctcagttagaagatgattattctctttattgggagcaatcaatacaattttaccttcgcatactttttcagaatgaacttctcttagtttaggttgatttctgctaatcccgatgtcatacgtatgattattaatatctttttcaatattttcatttttgacatggagagaaacatcgataaacggatgctcgttaaagaatgattttaaaaatttgggcataatgaatgtcgcgatatatgaagacacgacaacatttaatttcgattgaaacatcgtttttttaagttggatatgtttgatgccactttcatattgttcaataaaactttgcgcaattggaagaaatgtatgaccatcttcagtcaagataatttgatttttataagtttcaaatagtttcacattgagatgttgttctaaatttttaatttgcttatgtatagaaggtatagtgagattaatttcttcactagctaatcgatagtttaacgtcttcgctaaaatgacaaatgtatagtaccaatccaaattcatgaacttacctctttcaaaaaagttaataattcattagataatatttaatttttattgcataaaaataatattaatattatatcagaggttatcgagggggtgaagtaatatgattcgaattcaagataatacaataagggatagtatgcaacaaagtaatgttcgaaaaagtctatttataaaaaaagaagtattgaaacaaattaacaagttaaatataaattctgttgaagtaggcatgtgtactactatcgaggatgaatttaatattcatcaattcagagacattttaagccctgaaaaagaattagtagtattgactaggcttaatgaaaaagaaataaaaaaaatagtcaaattgaaaattcataatttagtggtaaaaatactattgccaatatctgacttgcatataaaagaaaagcttaatttttcaaataaatattatattcagaaaatcaaagactgcttggaaatattaaagaaagataaaaaaggagtagatatttgttttgaagatgcaacaaggacttctagagaaaaattgaaagaatacatggaaattatttcaaaatatcaagttagaacagttacatttgcggacactgtaggatgttcgacaccattagaatacggagatatttttaattactttgtaaaaaaatattctaacataattttttctgctcattgtcataacgatctagggttggctactgcaaatacattagctgcaattttaaatggtgcaaagcaaatagaaactacatttttgggaattggtgagagagcgggtaatgctcctattgaggaaataattactattttgacaaaaaaacaaatagaaagtacggaattcactttacccgacgtatataaaactagtattaatatttctaaaattctcgattttcaaatatcagaaaacaaacctataattggtgaaaatatatttaaacatgaatcaggaattcatcaagatggtactaaaaaaaatataaatatgtatcaatatttagttcctagtgatttaggattgaaaaattcacaagttgttcagtttccaataagtaatatttctagtaagaaaatcttgcacaataaatttaaatcaatagttaacactgaagaaattgatgaaaatatttctttctataaacttgtgaacaagttttcacctgaagtagcacctgaagatacagtggatttacttcagataataaaaaggaggagtaaagatggaaattttaaatgattctgtaaaaagttttgaaaaactttatttacaattacaagatggttttccagtgattgttcctactgatactaattataatttatgtagtttacctaacaacgatctttgtatcgataaaatatttgaatataaaaagcgatcgaaagataagccattatcattatttattgataagccagaggattggaaattgtatggagataatcaaaatacggaaatagttgataaactagttgaaatattttggcctggaccattaaatattattttaaaaaataaaacaagctataattatatgctcaataattcagatagtatagctataggatgtgtacaaaataaaacgatgagaagatttatttcatatattaattcacctatagcaattacttcagcaaatatctctggaactgccgatgatattttaataactgaaaatgaagcaattaagcacatgggcgaaaatgtaagatatatgctaagaagtcaaaataaaactaactataaaacatctagtacgattattaaagtgacagataataaaattgaattattaagagaaggagatataaagtttgaagaaataaaagaaagactaggtacaggtattatttatgaataagttaatacttgggatttatttataccgaattttttcacgagcatacttttatttaccgtttttattaatttactttttgattcaaggttattccataatacaattagaaatattaatggcgtcttatggcattgcagcatttttattctctctatacaaagagaagtgttttaaaatttgtaacttaaaagattctaataaattagttgttagtgaaatattcaaaatcatcggtttattgttgttattatatcaaaatcaatatttaattttagtagtggcacaaatattattagggttaagttactcaatgatggcgggtgttgatacagcaataattaaaagaaatataacaaatgagaaatacgtacaaaataagtcaaatagctatatgttcctatcattattaatttcagggattataggtagttatctttatggaataaatattaaatggcctataataatgactggtatattttcaattctaacaattataattattcgatgcacattagttgaaaatagggaattaaatttaataggagaaacaaagggaaagataaagaaatttctaccggaagagaagttttggatattgcattattcttttttaagagcgttaatattaggattttttataggatttattccaattaatatatataatgatttaaaactgaataatttacaatttatttcagtattaacttgttacacagttatgggttttgtatcttcacgttatttaactaaatacttgaactataagtttgtgtcagaaatttgtttagtaatatttttaataatatatacatatcaaagtttcatagcagttactatttctatgatatttttaggtatttcttcagggttaactcgtccacaaactataaataaactttctagcagtagtaacttaagagtgatgcttaattatgcagaaacgttatattttatttttaatatcgcatttttacttttgggtggttacttatatacaataggaactattcaatacttaatattatttatttcgttattaatttttatatatttaataataatattttattttacaaggagagagcaacatgaaaataaaaactgaatttaaagggaataatataccatatgaatacgcagcaggtgcagatgtgagtgattcaattaacgggaatccaattaaatcatttccatttgaagtgactgaattaccggaagggactaaatatcttgcttggtctttaattgactatgatgcaattcctgtgtgtggctttgcttggattcattggagtgtagctaatgtaagtgttagtggcaattcaatttctataaaagcagatttatcaagaacaaagggtgactatgtacaaggtaaaaatagctttactagtgggttgttggctgaagatttttcagaaatagaaaatcactatgtaggaccaacaccacctgataaagatcatcaatatgaattaacagtttatgcattagatcattctttaaatttgaagaatgggttttacttgaatgaatttttaaaagaagtaaatcaacataaaattgatcaaacaagtattaaccttataggaagaaaaatttaatactaaataactcatcaatataaaattgttcaattaaaagtatgaagaaacaagggatttaatttatatattaggtacagcgttcgctataatgcaaagaagtaattaaatttaagaaatgtaaacttagttattgtaatgtgaatttattcgaaaaaatagaaagtattaacaattatagcttttacattaattaaaattaatttttaaaaacaagtaaacaatttacatacttataatttttgaaacttttagatttgtgttatattgattttgtaagatactttaactcacaaaggagagagattatatgaaattaaaatcatttataactgtaactttggcactgggcatgatcgcaacgactggcgctactgtggcaagtaatgaggtatctgcagcagaaaaggacaaactaccggcaactcaaaaagctaaagaaatgcaaaatgttccatatacaattgcagtagatggcattatggctttcaatcaatcttacttaaatttaccaaaagatagccaaatatcatatttagatttaggaaataaagttaaagctttattatatgatgaacgtggtgtaacacctgagaagattcgaaatgcaaaatctgccgtttacacgattacttggaaagatggcagtaaaaaagaagtggatttaaagaaagatagttatacagcaaacttgtttgattcaaattcaattaaacaaattgatattaatgtaaaaactaaataaacacttaaaattatcaaattcaacatgaagcatttaattttacagtgatgattataatataattgccttgatacaaagattactcgtaaatgacatctttgtattaaggctttttctaaatttaaaagtgatgggttagaggtcattgagctttaaaatattcaaaatacaaaacatcaatggccaaaaataaaagccgcctttatctgggcagcttcaataataagaaagacatatttcattttatactaaatagttattgtgatgaatctttcggcggtttaattactgcagcaaaaattgctgtgaaaatcgtgaacaatactgccatgataattggattcactaaatttaagctgtctccacctactaggctattaagtacaaagttagccatttgcattaataataatgcccaaaagaatgttacgaggtgtttcatgtcattctacctccactttaattatatatattttattttaagtgaaagttagaaatttgtatagtaacatctcatatattttgaccatattatacagtttaaataaatgattttatctgaatggctattctaaattaagcgcattaaaaccaatttcatactgaaatttgacgataataaagcattaaaattttattaactagtcaatattcctacctctgacttgagtttaaaaagtaatctatgttaaattaatacctggtattaaaaattttattaagaaggtgttcaactatgaacgtgggtattaaaggttttggtgcatatgcgccagaaaagattattgacaatgcctattttgagcaatttttagatacatctgatgaatggatttctaagatgactggaattaaagaaagacattgggcagatgacgatcaagatacttcagatttagcatatgaagcaagtgtaaaagcaatcgctgacgctggtattcagcccgaagatatagatatgataattgttgccacagcaactggagatatgccatttccaactgtcgcaaatatgttgcaagaacgtttagggacgggcaaagttgcctctatggatcaacttgcagcatgttctggatttatgtattcaatgattacagctaaacaatatgttcaatctggagattatcataatattttagttgtcggtgcagataaattatctaaaataacagatttaactgaccgttctactgcagttctatttggagatggtgcaggtgcggttatcatcggtgaagtttcagaaggcagaggtattataagttatgaaatgggttctgatggcactggtggtaaacatttatatttagataaagatactggtaaactgaaaatgaatggtcgagaagtatttaaatttgctgttagaattatgggtgatgcatcaacacgtgtagttgaaaaagcgaatttaacatcagatgatatagatttatttattcctcatcaagctaatattagaattatggaatcagctagagaacgcttaggtatttcaaaagacaaaatgagtgtttctgtaaataaatatggaaatacttcagctgcgtcaatacctttaagtatcgatcaagaattaaaaaatggtaaactcaaagatgatgatacaattgttcttgtcggattcggtggcggcctaacttggggcgcaatgacaataaaatggggaaaataggaggataacgaatgagtcaaaataaaagagtagttattacaggtatgggagccctttctccaatcggtaatgatgtcaaaacaacatgggagaatgctctaaaaggcgtaaatggtatcgataaaattacacgtatcgatactgaaccttatagcgttcgcttagcaggagaacttaaaaactttaatattgaagatcatatcgacaaaaaagaagcgcgtcgtatggatagatttactcaatatgcaattgtagcagctagagaggctgttaaagatgcgcaattagatatcaatgaaaatactgcagatcgaatcggtgtatggattggttctggtatcggtggtatggaaacatttgaaattgcacataaacaattaatggataaaggcccaagacgtgtgagtccatttttcgtaccaatgttaattcctgatatggcaactggacaagtatcaattgacttaggtgcaaaaggaccaaatggtgcaacagttacagcatgtgcaacaggtacaaactcaatcggagaagcatttaaaattgtgcaacgcggtgatgcagatgcaatgattactggtggtacagaagcaccaattactcatatggcaattgcaggtttcagtgcaagtcgagcgctttctacaaatgatgacattgaaacagcatgtcgtccattccaagaaggcagagacggttttgttatgggtgaaggtgctggtattttagtaatcgaatctttagaatcagcacaagctcgaggtgccaatatctatgctgagatagttggctatggtactacaggtgatgcttatcatattacagcgccagctccagaaggtgaaggcggttctagagcaatgcaagcagctatggatgatgctggtattgaacctaaagatgtacaatacttaaatgcccatggtacaagtactcctgttggtgacttaaatgaagttaaagctattaaaaatacatttggtgaagcagctaaaaacttaaaagttagctcaacaaaatcaatgactggtcacttacttggtgcaacaggtggaattgaagcaatcttctcagcgctttcaattaaagactctaaagtcgcaccgacaattcatgcggtaacaccagacccagaatgtgatttggatattgttccaaatgaagcgcaagaccttgatattacttatgcaatgagtaatagcttaggattcggtggacataacgcagtattagtattcaagaaatttgaagcataattataaaaatcttcagtaacgttgttttagttactgaagattttttcagtttctttatactaaggtgagcgacagcacaatcgtcataataaaatataaaatatttattaataataagggtattatccatgtagaaacatagtaatgctctttttttacctcttgtgggttgaaaaatggatcatcagagatagacttcttctttttcgaagatgacatttgatactttaatcttctaaaaccataacttgtcgcatcaaaaatgccttcttgtacaagtaaaatcaaaaatatgctaataaaaataattaatgaaacataaaacaatatatttaaatatgtaatgatagtatggctattaaaaacccatataataaatgttaacattggggttattagtgccattccaagccatttttttcaacatttgatcactcccacttatagaaaactcttacgcatagtttacattaaaatcagacattgaggaatgattttttaatttcttcagctttattgaaattctaaaaatcaatcattcttcattagtttaaagcaaaaaaatattgatatatagtaaatattgtatatataatattagttaagatttcagaaaattttgaagggaatggaaatttagaaatcggaatttgttagaggaggggattagatggggaaatatattttcaaacgatttatttatatgcttatttctttatttattattattacaattacatttttcttaatgaaattaatgccaggttcgccatttaacgatgctaaattaaatgctgaacaaaaagaaattttaaatgaaaaatatggattaaatgatcctgtagctacgcagtattttcattatttaaaaaatgttgttacaggcgattttggtaattcattccagtatcataatcaacctgtgtgggatttgattaaaccgagactactaccttcttttgaaatgggtcttacagcaatgttcatcggtgtgatactgggacttattttaggtgttgcagcagctactaaacaaaattcttgggttgactatacaactacagttatttcagttattgcagtatctgtaccatcttttgtacttgctgtacttttacaatatgtatttgcagttaaattaagatggttcccagtagctggatgggaaggtttttcgaccgcggtattaccgtcacttgcattatctgcagctgttttagcaactgtcgccagatacataagagcagagatgatagaggtattaagttcagactacattttattagcgagagctaaaggtaattcgacaatgcgtgtactttttggacatgcacttagaaatgctttaattccaattattacaattatcgttcccatgttagcaagtattttaacaggcactttaacaattgaaaatatttttggggttcctggattaggggatcaattcgtacgttcaattacaacaaatgatttctcagtaatcatggcaatcacactattatttagcacattgtttatcgtttctatttttattgtagatattttgtacggtgtgatagatccacgaattcgtgttcaaggaggtaaaaaataatggctgaaaataaaaacaatttgtcgattaacgacgatcattctaatgcagctatgacgcatacctctgacgctatcgcatcatctgattttattattagaaaattagatttgaatcaggaacctgaaatgcaacgagaaagcaaaaacttttggcaagatgcttgggctcagttaaaacgaaataagttagctgttgtcggtatgataggtttaattatcattgtaatatttgcttttatcggtccagttataaataaacatgattatgctgaacaaaatgtacaacatagaaatcttccggcaaaaatacctgtattagacaaagttccatttttaccttttgatggtaaagatgcagatggcaaggatgcttataaagcagcaaatgctaaagaaaattattggtttggtactgatcagctgggtcgagatttatggacaagaacatggaaaggtgctcaaatttcattgtttatcggtgttgttgctgcgatgttagatatttttattggcgttgtatatggtgcgatttctggattcttcggtggacgtgtcgatacgattatgcaacgtatacttgaagtcatagcatctattccgaatttaattgtcgtaattttatttgtattaatttttgaaccatccatttggacaattatattggctatgtctatcacaggctggttaggcatgagcagagttgtacgtggagaatttttaaaattgaaaaatcaagagtttgtcatggcttcgaaaacattgggggcttcaaaattcaaattgatatttaagcatattttacctaatacgttaggtgctatcgtggttacatcaatgtttacagtacctagtgctattttcttcgaagcatttttaagtttcattggtataggtgtacccgcacctcaaacatcgttagggtcattagtaaatgatgggcgcgcaatgttattaatttatccacatgaattatttataccagcaatgattttaagtctattaattctattcttttacttatttagtgatggattacgtgatgcatttgatccgaaaatgcgtaaataaaagggggcatagcatatgactgaaagaatattagaagtaaatgatttgcatgtttcctttgatattacagcaggggaagtgcaggcagtgagaggtgtagatttttatttaaacaaaggggaaacattggcaattgttggtgaatcaggttcaggtaaatctgtaacaacaaaagcaattacaaaattattccaaggggacacaggaagaattaaaaagggagaaattttatttttaggggaagatttagcaaaaaaacctgaaaatgagttaattaaattacgtggcaaagatatttcaatgatctttcaagatccaatgacatctttaaacccaacgatgcaaattggtaaacaagtcatggaaccattaattaagcacaaaaattatagtaaagcacaagctaaaaagcgtgcattggaaatactaaatcttgtaggtttaccaaatgcagaaaaaagatttaaagcatatccacatcaattttcaggtggacaaaggcaaagaattgttattgcaaccgcattagcttgtgaacctaaagtgctcattgctgatgaaccaacgactgcattagacgtaacgatgcaggcacaaattttagatttaatgaaagaactacaacaaaaaatcgatacagcaattatttttataacgcatgatttaggggttgttgcgaatattgctgatagagtggcagttatgtatggtggtcaaatggttgaaacaggagatgttaacgaaatattttatgatccaaagcatccatatacatggggattattatcgtcaatgcctgatttatcaacaacaaatgacacaccattactagcgattcctggagcgccacctgatttattacacccacctaaaggtgatgcatttgctagacgtagtcaatatgcattagatattgattttaaagtagaaccaccgtggtttaaagtttcaccgacacattttgtgaaatcttggttattagacgcacgtgcaccaaaagttgaactacccgagctggtaaaacaacgtatgaaaccgatgcctaataattatgaaaaaccactcaaggtagaaagggtgtcgttcaatgaaaaatgatgaagtgctattatctattaaaaatttaaagcaatattttaacgcaggaaagaaaaacgaagtgagagcgattgaaaatatttcgtttgaaatatacaaaggggaaacattaggtttagtaggagaatcggggtgcggtaaatctacaactggtaaatcaattatcaaacttaatgatattacaagtggagaaattttgtatgagggtattgatatacaaaagattcgtaaacgtaaagatttgcttaaatttaataaaaagatacagatgatttttcaagacccatatgcgtctttaaatcctaggttaaaagtaatggatatagtagctgaaggtattgatatccatcatttagcaactgataaacgtgaccgtaaaaaacgtgtctatgatttacttgaaactgttggattaagtaaagaacatgccaatcgttatcctcatgaattttcaggtggacaacgccaacgtattggaattgcccgtgcattagccgttgaaccagaatttattatagcagatgaacctatttcagcattggatgtttcaattcaagctcaagtagtcaatttgttattaaaattacagcgtgaaaaaggtattacattcctatttattgcacatgatttatcaatggtgaagtatatctctgatcgaattgcagtcatgcattttgggaaaattgtagaaatcggaccagcagacgatatttatcaatatccattacatgattatactaagtctttattgtcggcaattcctcaaccggatcctgaatcggaacgtagtcgcaaacgatttagttatattgatgatgaagcaaataatcatttaagacaattacatgaaataagaccaaagcattttgtttttagtactgaagatgaagcggcacgactacgaaaaaatttgttggtgacacaagattaaggggaagggggaaatgaaatgacaagaaagttgaaagcgctgattttaatattggttgccacaattgcattaagtggttgtgctaatgatgatggtatttattcagataaaggtcaagtattcagaaaaattttgtcagcagacttaacatcccttgatacatcattaataacggatgaaatatcttctgaagtgactgcgcaaacattcgaaggtttatacacattaggaaaaggtgacaaaccggtgttaggtgttgcgaaagcttttcctgaaaagagtaaagatggtaaaactttaaaggttaaattaagaaacgatgctaaatggagcaatggtgacaaagtgactgcacaagactttgtttatgcttggagaaaaacagttgaccctaaaacaggttctgaatttgcatacattatgggggacattaaaaatgcgagtgatattagtactggtaagaaacctgtagagcaattaggtatcaaagcattagatgatgaaacattacaaattgaattagaaaagccggttccatatattaatcaattattagcactaaatacatttgcacctcaaaatgaaaaagttgccaaaaaatatggtaaaaattacggtacggcagctgatagagcggtatacaatggtccatttaaagttgatgattggaaacaagaagataaaaccttactatctaaaaatcagtattattgggataaaaagaatgtaaaattagataaagtgaattataaagttattaaagacttacaagcaggtgcatcattgtatgatactgaatcagtagatgacgcagttattacagcagatcaagtaaataaatataaagataataaaggattaaactttgtgttaacgactgggacattttttgtgaaaatgaatgaaaaacaatatcctgattttaaaaacaaaaatttaagactggctatcggacaagcaatagataaaaaaggatacgttgattcagtgaaaaacaatggttcaattccttccgatacactaacagctaaaggcattgcgaaagcgccgaatggcaaagattatgcgagtaccatgaattcacctctaaaatataatcctaaagaagcaagagaacactgggacaaagctaaaaaagagttaggtaaaaatgaattgacattttcaatgaacacagaagatacaccagatgccaaaatatctgctgaatatatcaaatcgcaagttgagaaaaatttaccaggagttactttgaaaattaagcaattaccgttcaaacaaagagtatcattagaactgagtaacaattttgaagcatcacttagtggttggtctgcagattaccctgatcctatggcttacttagaaacaatgaccacaggtagcgcacaaaataatacagactggggtaataaagaatacgatcaattacttaaagtagcaagaaccaaattggcacttcaaccgaacgaacgatatgaaaacttgaaaaaagcagaagaaatgttcctaggagatgcaccggtagcaccaatttatcaaaaaggtgttgcacatttaacaaatcctcaagtaaaaggattgatttaccataaatttggtccaaataactcacttaaacatgtatatattgataaatcgatagataaagaaacaggtaagaagaaaaaataatatgctttgtaaattaggctggagatatatctccagtctttttgtgttgcagaaaaactttgggaataaaaaattaaaataagtcgttttttaaattactgaaattgattaaatgcattaataactgaatattctaaaaataaacttgtaataattttttctatgagtaaactaaaaagaaaaaaattagattgaaagtaggaggcatataaatggggaagctaattaaatatatttcaatacttattgttatcgttttagtgttgagtgcttgcggaaaaagcagtaataaaaatgaaggagtaaaagatgctactaaaacagaaatctcaaaacataaaggcggtaccttaaatgtagcattaacagcaccgccaagtggcgtttattcttcgttattaaatagtacacatgcagatgctgtagttgaaggatattttaacgaaagcttattagcaattgataaaaaaatacgtcctaagacatatattgcttcatggaaggacatcgagccggctaagaaaatagaatttaaaattaaaaaaggtattaaatggcatgatggtaatgaattgaaaattgatgattggatttattcaattgaagtcttagctaacaaggattacgaaggtgcttattatccaagtgtagaaaatatccaaggtgcgaaagattatcatgaaggaaaaactgatcatattagcggattgaagaaaatagatgactacactatgcaggttacatttgataaaaaacaagaaaattacttaacaggatttattactggacctttattaagtaaaaaatatttatcagatgtaccaattaaagatttagctaaatcagataaaatccgaaaataccctattggtattggaccgtataaagttaagaaaattgttccaggtgaggctgttcaactcgttaaatttgatgattattggcaaggtaagcctgcactagacaaaatcaatttaaaagttattgatcaagctcaaattattaaggcaatggaaaaaggcgatattgatgttgcgaatgatgctaccggtgcaatggcaaaagatgctaagtcatctaatgctggtctcaaggtattatctgcgccaagcttagactacggtttaataggattcgtatctcatgattacgataaaaaagctaataaaactggtaaagtgagaccaaaatatgaagacaaagaattacgtaaagcaatgctttatgcaattgatagagaaaaatggatcaaagcatttttcaatggttacgctagtgaaataaatagttttgtaccatcaatgcattggatagcagctgatcctaaggaactaaacgattataaatatgatcctgaaaaagctaaaaaaatcttagataagttaggttataaagatagagatggtgacggatttagagaagatcctaaaggtaataaatttgagattaactttaaacattattcaggttcaaatcctacttttgaaccaagaactgctgcgataaaagatttctgggaaaaagttggcttgaaaacaaatgtgaagttagtagaattcggtaaatataatgatgacttagcaaatgcatctaaagatatggaagtgtacttcagatcgtgggcaggaggtacagatccagatccatcagatttataccatactgatagacctcaaaatgaaatgagaacagttttaccaaaatcagatcaatatttagatgatgcattagacttcgataaagtaggcattgatgaaaagaaacgtaaagatatttatgttaaatggcaaaaatatatgaatgatgagttacctggattaccaatgttccaaggtaaatcgataactattgttaacgataaagtacgaaacttagacattgaaattggaactgatcaaagtttatataatttaactaaagaagcttagtaatgtaacctcgacgattttgtcgaggtttacttatatggggggatgttatgaataatgtattgttagaggttaaagatttagaaacatcattaaaaatagataatgaatggttagcaactgttgaaaatatttcttttgaattatctaaaggagaagttttgggtatagtaggggaatctggttgcggtaagtccatattaagtaagtcaattattaaattattaccagaaaagatatctaaactaagtaatggagaagttatatttgatggtaaacgaatcgatacgctcaatgagaagcaattgctagatattcgaggaaatgatattgctatgatttttcaagaacctatgactgctttaaatccggtatttaccataaaaaatcaactagtggaatctataaaatcacataaaaaaatttctaaaaaagaagcaaataacttagcaaaagatttactaaaaaaagttggaattgcaagacaagatgaaatattaaatagctatcctcatcaattatctggtggtatgaggcaaagagtaatgattgcaatggccatttcatgttctcccaaattattaattgctgatgaacctacaactgctttggatgtcacgattcaagctcaaatattagacttattaaaagaattgcaaaaggaaacgcaaatggcaattatgatgattacacatgatttgagtgtggttgctgaattttgcgataaagttttggttatgtatgcaggtcaaattgtagaatttggaggcataaaagaaatactacacaatccgaaacatccttatacccaaaaattattatctacaattccaaaacttaaagaagagcagaaacgacttgaaacgatagaaggaattgtgccatcaattcaagcatttcacgtaaataagtgcagatttgcaaatagatgtaacaaaaaactggatatttgtaataatcaatctcctaaaatgcatgtttgtgaagacgtcattgtacgttgtcatttgtaccaaaatgaatataaggagatataagaatggaaaatattttagaagtaaatcacataaaaaaatactacaaaattaaaactggattattacaaaaaactcagtacgttaaagctgttgatgacgtatcgttttcaataaaaaaaggacaaacttttggattagtaggagaatcgggttgtggtaagtcaacgttaggtaaagtgattatcaggcttgaagatgcaacttcaggctcaataattgttaatggtgaagatataacaaggttacaaggtaaaaaactgagaaaatcacgacaacaatatcagatgatatttcaagatccgtatgcatcattgaatccgatgcaaatggttggagatatcatttcagaacctattttaaattataaaaaattgccaaaagaagaaataaaaaaagaagtactatatttattaaaatgtgttggcctaagtgaagatgcatattataaatatgcacatgaattttcaggtggacagagacaaagagtgggaattgcaagagcattggctttgcgtccgagtttaattgttgctgatgagcctgtaagtgcattagatgtatctgttcaatctcaagtactgaatttattaaaagatttacaagaacaatttaacttaagctatttatttattgcacatgatttaagtgtagtaaaacatataagtgatgtcattggagttatgtatttaggtcatatagttgaaatcgcatctgataaagaaatttatgaaaatcccaaacatccatatacaaaagcgttgatttcatcaataccacaaattgataagctaaataaaaatagaattatattaaagggagaattaccttcgccaagtaatccgccacaaggttgtcctttccatactagatgtccaattgctcaagatatgtgcaaaaaaagtatgccagaattaaaggacattggtaacgaacatcaagttgcttgtttctacgtagataaagtaggtgatttaaatgattaaattaatacttaaaagattagggttaatgatcccgttactaattttaatctcaatagttgtattttcattagcaatcatacaaccaggagatccattttcagatctacaaaacggtaaaataaaacaagaagcaataaatgcacaaagagaaaagttaggtctcaacgactcaataccacatcaatacattagatgggtcaatcatgttatacacggtgatttaggggagtcaatcaaatataaaaggccggtaattgatgttattgaggaaagaattccaaatacaatattactcggtgctatgtcattaattattacttatattatctcatttgctttaggaataacgtcaggtagatattcttacagtttgacggattatactgtgcaaatatttaattatttgatgttagccattccatcttttattgcgggagtatttgcaatttttatttatgaaaagaaaaccatacgctatgcgtatggttcagaaaaggttctaccattgtcacaaaaaatgcatctctacgtgctagaataaatattggtcagccaaccaaaataatcaacacgaggagatgctatttaatgtcatctgacacaaacagtttagcacatacaaaatggaattgtaagtatcatattgtctttgcacctaaatacagaagacaagtgatatatggaaaaataaaaaaagatatagggattatattgcgtcaattatgtgaaagaaaaggtgtagagataattgaagcagaggcatgtaaagatcatatccatatgttagtaagtataccacctaaacttggggtatcatcatttgttggctatttaaaaggaaaaagtagtttaatgatatttgatagacatgctaacttaaagtatagatatggaaatagaaagttttggtgtaaaggattttatgtggatacagtaggtagaaataaaaaagtgattgaaaattatattcgtaatcaattacaagaggatatcgttgcagaccaaatctcaatggaagaatatttagatcctttcactggagagaaaaatagaaaaagaaagaaaaaagagtaaccctttagggttgctgaaatagtagtgcagttggctgacttgtcagtgcccttttagggctggccagtaaggaaggcttatagccgcagaacaaaccacccgttcacacgggtggttttgattttttcttttgaattacaatggtttccgtttcaaggttctgttgatattaaccttaaagaaggtacttttgaatattatatgagtaaaatttatcatacatttttacctgcattaactttaggattattatctactgctggttatattcaatatttacgtaatgatattattgaaaattctaaaaaagattatgtattgacggcaaggtcaaaaggattatctatgaataaaatttataataaacatatattgagaaattctctaatacctattattacatttttaggtgctgatattgtaagtattttaggtggagctgtgattacggagactatcttttcatataacggtatcggtaaattatttttagaatcggtaataggccaagactatccattaatgatggcattaacgttatttttctcatttttaggtttactgggtaatttgatttctgatattacttatggatttatagatccaagaattagaagtaactaggggggattagaatgcaaaataagtcaaaatcgccttttaaaattgcattgtctaaatttattcataataaaattgcaatgttatcgattatttttttattaatcataactattgtatcaattatagcgccattaatagctccttttccagtgaaccaacaagatttattaaatataaaaggtgaaatgacagcacaaaacattcttggtacagactctggtggtagggataactttagtcgtttgttatatgcaggtcgtatttcattatccattggaattacatctacaataggaatgcttttgattggaattacagttggagtgatttctggttattttggaggtattgttgatacattattaatgagaataaccgaatttgttatgttatttccgtttttaatatttgcaattgtattaaatgccgcacttggagataaaattaaaaatccttatggatctgccataattcttgttctagttattatcgtattaagttggggaggtattgcaagactcgttcgtggtaaagtacttcaagaaaaagaaaatgaatactttttggcagcaaaatcaattggtacacccacatataaaattattttgaaacatcttttgccgaatatattaagtgtagttatcgtacaagcaacattgttatttgccggtatgattgtagtagaatcgggattgagctttttaggattcggaattagtaaagcaatcccatcttggggtaatatgttaagtgatgctcaagaaggggatgttataagtggtaaaccgtggatatggatgccacctgctataatgattacattaactatattaagtataaactttgtaggggaagggcttaaagatgcttttaatcctagaggtagacgttaaataataaaagaggcactagttaattctagtacctctttattttatctcttacgtcctaaacccatcgctttttccattttcttgacagttttaaatgaaactttgtgtgctttatctctaccttgatctaaaatatcatcaagtttatctgagttatagaaactttcgtatttttcttggaattctattaaaaatgctttaactatttcagcaaggtcacctttaaatttaccataaccttcaccttcatattttgcctcaatatctttaattggcatgtctgttaatccagcgtatattgaaattaaatttgttatacctggcttgttgtcacgatcaaatttaataataccatctgaatcagttactgcgcttttaatttttttagctgcaacattcggctcgtctaataatgaaatgaagtttttagcattatcatcactcttactcatttttcttgttgggtcttgtaaactcatgacacgtccaccaactttaggcatacgaatttcaggtttcacaagcacatcattatagcggctattaaatctatctacaaggttacgagtcaattcgatatgctgcttttggtcatcgccaactggaacgatattagtattgtaaagaacaatatcagctgccattaaaggtggatatgttaatagaccagctggtataccttcaactgctttctgagctttatctttgtattgcgtcatacgctctaattctccaacagaagcaatcgtagttaacatccatcctgcttgtacgtgtgcagggacttcagattgtatgaacaatgttgctttgtctggatctataccagaagctaaataaatcgctgctaattgtctagtttgtttacgtaattttaagcgatcttgtggcattgtaattgcatgttgatctacgatacagaaataacaatcgtagtcattttgcacatcaacaaattgttttagtgcgccaatataatttccaatagtaggaattccactaggttggatgcctgaaaataatgtctccatttaaatgcctactttcttagtaatattttaataattatcattataacagtatttcttaaaaatgtaagatgtgttagaatatacgtataacttgctactaacaaagggattaataatcttttttataagtgtagaaacttatctgaaaaattaggtttttctcatttaattttaatgttagatagttataataaatagtaacgattaagaattttagaaaaaaatgttttttcttgatctataactaaattttaagcaatgaattttattcattcaaataggagagtgagatgtatggtaacattatttacttcaccaagttgcacatcttgccgtaaagcgaaagcatggttacaagaacatgacattccgtatacggagcgtaatattttttctgaacatttaacaattgatgaaattaagcaaatattaaaaatgactgaagacggtactgatgaaatcatttctacacgttctaaaacataccaaaaattaaatgttgatattgattcactaccattacaagacttatattcaatcattcaagataatcctggcttattacgtcgtccaattattttagataataaacgactacaagttggttataatgaggacgagattcgacgtttcttacctagaaaagttcgtacgttccaattacaagaagcacaacgtatggttgactaataaccatttaactatgtgtcatactttactaaaagatatgtcaagcaacgctatttctatagtgttgcttttttggttttaattttacaatacttgcttagtatcttctaaagcaaatgtgcaattgttaatataactctatattagagtgttttggatgaaacatttgctatgataaggtaaaattaaattaagaaagtgctttaatgctttaactgtataaatcatttaaatagttttgctacaacgaatatgttattataagttaccaaaatattttagagaaagaaatcaaacaaatatattgtattttgtttgatgctttaatacaatgtggatactattcatcgactgtaaggagtgagatgatatgagaatagaacgagtagatgatacaactgtaaaattgtttataacatatagcgatatcgaggcccgtggatttagtcgtgaagatttatggacaaatcgcaaacgtggcgaagaattcttttggtcaatgatggatgaaattaacgaagaagaagattttgttgtagaaggtccattatggattcaagtacatgcctttgaaaaaggtgtcgaagtcacaatttctaaatctaaaaatgaagatatgatgaatatgtctgatgatgatgcaactgatcaatttgatgaacaagttcaagaattgttagctcaaacattagaaggtgaagatcaattagaagaattattcgagcaacgaacaaaagaaaaagaggctcaaggttctaaacgtcaaaagtcttcagcacgtaaaaatacaagaacaatcattgtgaaatttaacgatttagaagatgttattaattatgcatatcatagcaatccaataactacagagtttgaagatttgttatatatggttgatggtacttattattatgctgtacattttgatagtcatgttgatcaagaggtcattaatgatagttacagtcaattgcttgaatttgcttatccaacagacagaacagaagtttatttaaatgactatgctaaaataattatgagtcataacgtaacagctcaagttcgacgttattttccagagacaactgaataacgatattaattaagcaacgcactatgaaaggagactctttggagtctctttttttattgatttcaaaagctgaaaaagtaatagtagttaaacttacgtgtaatattttgaggtgaagatatgttagtagctttaaatggagaaaaggaacgcgtgttagcaactactgcattgagaaagacacaatatttttgtccggtgtgtggcaagcaagttattttaaagcgtgggctcaaagtaattagtcattttgcacataaacatttagcggaacaaaaatgttttaataatgaatcgattaaacattataaaagtaaattgattttagcacagatgatacagcaacaaggatgtaaagtagagatggagccatttttaaaagaaataaaacaaattccggatattttgattaataataaatatgttattgagctacagtattcgccaattccttataaacagattcttcaacgaacggaaggtttaaagaaaatgggatataaagtaagttggttattaaatgatgttgattattgtcataataaagtgaagttcaatcattttcaaagtatgtttattaatccaatcactcgaaaacttcatacgttcaatttagagaaaaaacaaataatgatgtttcaacaaatacaatatataggcgggcacaaatatgtcgctgaaaaagggaatgccaaaattagtgagttgtttaatgaggcgccttgtgattatcatgctgtttataaattatcaaaattcgcaattaatcaatatatcaaatattgtcgctggcaaaattctgttttagaacccactttaagtgcaatgtatcagttgcatttaactgatcaagaagtagtgcacaattatggttatatttttccagagcaaatttatattgaaaatcatccaattgagtggcaattacaagttgatttatggttaaagaatggaaaaagcaaattagtaagtgacaatcttaattattttaaactgaaaaagtttattgttgctctagaaagtaaaacagcaattatagaaaaacttattaacaattatttaaatattagttcagatagaggtaatgacgtgcaaattttgttctaaaatgagaaaattatatcaattatattttattaggaggtttactacatatgagtcaacaattatcgagagaagaacaggaacgtaaatatcctgaatatacatgggacttaacaactattttcaaagatgatgaagcttttgaggctgcatttaaagaagttgaaaatgagttaggcaaagaagaacaatttaaaggacacattggtgatagtgctgagacattatacaatgcgttagaattagaagatacattaggtactaaattagaaaaagtatatgtatacgcgcacctaaaacaagaccaagatacaacgaacgacaagtatactggtatggagtcaagagcacatcaattaattattaaatttagctcggcatggagtttcttagtgccagagattttacaaattgatgaagataaaattcaatcatttgtaaattcatatgataaattacaaaaattcgcatttgatttgaagttgattaacgaaaaacgtcctcatattttagatgctgaaactgaaaagttattaacagaagcgcaggacgcgttatcaacaccatcaaatgtatacggtatgtttagcaacgctgatttagtatttgaagatgcgattgataaagatggaaatgcacacccgttaacacaaggtacatttattaagtatttagaatcagatgatcgcaaactaagagaaagtgcttttagaaatgtatataaagcatatggtgctcataataatacgcttggcgctacgctagcaggtgaagtgaagaaaaatgtatttaatgctcgtacacacaattacaaaactgcaagagaaaaagcattaagtaataatcatattccagaaaatgtatatgacaatctagtaaaaactgtacataaatatttaccattgctacatagatatactgaattgcgcaaagaattgctaggtttagatgacttgaaaatgtatgatttatatacaccattaattaaagatattaagtttgaaatgccttatgaagaagctaaagagtggatgttaaaagctttagaaccaatgggtgaagaatatttaaatgtagttaaagaaggcttaaacaatcgttgggtcgatgtctatgagaataaaggtaaacgttcaggtggctattcatcaggtgcacatttaactaatccatttattctacttaactggtctaatactatttcagacttatacacattagttcatgaatttggacattcagcacatagttacttcagtagaaaattccaaccgtcaaattctagtgactacactatttttgtcgctgaagtagcatcaacttgtaacgaagcacttttaagtgattatatggataaacatcttgatgatgaaaaacgcttattattattaaaccaagaattagaacgtttcagagctacattattccgacaaacaatgttcgcagaatttgagcataaaattcataccattgaagaagcaggtgaaccattaacgccaactagaatgaatgaagaatatgccaaattaaataaattatacttcggtgattctgtagaaactgatgaagatattagtaaggaatggtcacgtattccacacttctatatgaattattatgtatatcaatacgcaactggttacagtgcagctcaaagcttaagtcatcaaattttaacagaaggtaagccagcagtagatagatatattaatgaattcttgaaaaaaggtagctcaaattatccaattgagatattaaaaaatgctggtgtagatatgacaacacctgaaccaattgaacaagcttgtgaagtttttgaacaaaaattgaacgcttttgaaaaattaatgaaagcttagcgctattgtattcgcttacattatgaacagattgtgacaatttaaattaagtactattaaaaggttgaaatggaagagatagcgtgttatattatgaacatgaaattaatcacataacaaacatacccctttgtttgaagtgaaaaatttctcccatcccctttgtttagcgtcgtgtattcagacacgacgtttttttatgttcttttttaataagagggaagtgaagttgtataaaaatgtattaaatatgcactttttatacattgacgattaatatatgtctattatgtaccaaatttataatttgtataattttcgaactggttaaattcgaaaaacatcactaatatatttagatcgatgcgaaacattacgttctaataatttaatgctgcaaaattaagagtcaataaaaagacctcgttacatttatggtgtacgaggtctttaatttatttatgaaaagaaaaccatacgctatgcgtatggttcagaaaaggttctaccattgtcacaaaaaatgcatctctacgtgctagaataaatattggtcagccaaccaaaataatcaacacgaggagatgctatttaatgtcatctgacacaaacagtttagcacatacaaaatggaattgtaagtatcatattgtctttgcacctaaatacagaagacaagtgatatatggaaaaataaaaaaagatatagggattatattgcgtcaattatgtgaaagaaaaggtgtagagataattgaagcagaggcatgtaaagatcatatccatatgttagtaagtattccacccaaacttggagtatcatcatttgttggctatttaaaaggaaaaagtagtttaatgatatttgatagacatgctaacttaaagtatagatatggaaatagaaaattttggtgtaaaggattttatgttgatacagtaggtagaaataaaaaagtgattgaaaattatattcgtaatcaattacaagaggatatcgttgcagaccaaatctcaatggaagaatatttagatcctttcactggagagaaaaatagaaaaagaaagaaaaaagagtaaccctttagggttgctggaatagtagtgcagttggctgacttttcagtgcccttttagggctggccagtaaggaaggcttatagccgcagaacaaaccacccgttcacacgggtggttttgatttattttgatttgattttaggcattttagatttccagaaatcgccatctggatatttaagtttttcaattttttgttgaatagctaacttctttaactccttgtttaaaagtttttctggccattcataaatagtaagtaattcttccatcgttacaagttgttgttgctgtatataagtttctagtttaggaggaagattcttttcgataggtttacccatcaattcattaattatataagtatagatgtgatatgggtataatccttcgacttttaaaccttcttcatgaacatcttcactaaagaaaacgagagaaggggcttgttcgatttccatttctcttgcaatatgcaaatcaattttcaagctttcagttagtttacttttttgtaagtcgtctttaaatacttctaaatcaatacctgcattttgaatacagtcacaaatcattgattctgtaataatatctcttttaggtatgatttcattttgcattaaatgtataaatcgttcggcacgtacacgaccttgtaactcagctgctttataagctagggcgatgttatcaaagttggatgtactttgagcttggcatttcgttaatacttttaacgaaggatttaatatatgtctgatacgtatatattgattatattcaattcttaatttggataagattgctgataatttgaagcaatcggagctaaatggatcgaaaaatgaataaatttcgattttacttacaggtgatagattaatatcttcacgactcttattttccattattcgtaattctccagccatgtttattcacctacaattaattttaggaattcaccatatgattagcagttaatcttaagcgctcaaataaataatctccaacaccttgtggaaacgcagcgcgattaattgctgtctgcatattttctaaccatgcatctctttcaaattcagtgattgtaaacgccatatgtctttttcttagcataggatgtccgtgttcttcggtataaatgtttggaccgcccaaaaactgtgttaaaaattgcttttgtttacgacttgtttctgcaaaatctcctggaaacaggtgattaagtcgttcatctttttctacaagggtgtaaaaataatcaatcatatcgtataacgcttctttaccaatgatgtcatatggtgttgttgtcatttaatcacccattttcaaaaatttactgttacgaacttaagttaatatataactaatataacatgattttaaacatttgaaagaaatatgcatatttgccaatttaatttatattgtttgaaagtgtttcttttttcttaaaaaaacgttgaactttatttaaaggttgatgatgttcgaggtttagttcgtttaataaagattggaacttttgtaaaccttgattatagtctttaacttcgaactctaactcataatccgtagtatcgaaatactcacttttatctaaaacaagtaaatcacctttatatttagtttcttggcgatatgtcgttaatgcgccaagtattgataaagttgtatcctttacaccaaactgttcaactataatttgacgaatgtcatctggaagattgtcgtttgaaataatcaagttcatctctggtttaatgtcgacgatatagttgtattctaatagaccaacctttgctggtgtctttaaagtcatttcatattgattgtctttaactcttatgcgtagtgcagagcgatgttcctttaatttgaaatcgggtgtatcaatatagtaattgacttgcttaaacagcacactgtctttaaaatatttctcttgcaatttattatagattgatgcagttatcatttgtttaaattctatttcatgatttgttgccatgatatgtatacacctcgtatcaaattcaatttatcttaactatattatgaatgacaaagttgaattttaaaagtaatttcctttatctattatcaatgttaatttgaccattaaaaatagtgttcgtaagtgttttgtattattgaattgtgttaaaatgttatggaataagaggaggattaagcatgcgtttatatattaatgaaattaaaattaaagatgacacactttattgttatacagaagattctattaaaggattatctgaagtaggacaaatactcgttgatagtgataattatgcctttgcgtatacattagatgatggtaaagcgtatgcttatctcattttcgtacaagaaacatggacgatgttgcatgaaaacatgactaaaaaaattattatcaatgatgaactagaattgactgaattccaccaagaacttacttatattttagacaacataaaaggaaataataattatggtaaggaatttgttgcaaccgttgaagaaacattcgacattgaataaggcggggtgaagcactatgaatcaatgggatcagttcttaacaccttataagcaagcggttgatgagttgaaagtgaaacttaaaggcatgcgtaaacaatatgaagttggtgaacaagcgtcgccaatagaatttgttactggtcgtgttaaaccaatcgctagtattatagataaggcaaacaaacgacaaataccatttgataggttaagagaagaaatgtacgatatcgctggtttaagaatgatgtgccaatttgttgaagatattgatgttgtcgtcaatattttaagacaaagaaaagattttaaagtaattgaagaacgagattatattcgtaacactaaagaaagtggttaccgctcgtatcatgtcattattgaatatccaatcgaaacattacaaggccaaaaatttatattggctgagattcagattcgtacattagcaatgaatttctgggcaacgattgaacatactttacgatataaatatgatggtgcttatccggatgaaattcaacatcgtttggaaagagcggcagaagcagcgtatttacttgatgaagagatgtctgaaattaaagatgaaattcaggaagctcaaaaatattacacgcaaaaacgttctaaaaaacatgaaaatgattaacgaggtgttataaatcatgcgttatacaattttaactaaaggtgactccaagtctaatgccttaaagcataaaatgatgaactatatgaaagattttcgcatgattgaggatagtgaaaatcctgaaattgttatttcagttggtggtgatggtacattactacaagcattccatcagtatagccacatgttatcaaaagtggcatttgttggagttcatacaggtcatttaggattttatgcggattggttacctcatgaagttgaaaaattaattatcgaaattaataattcagagtttcaggtcattgaatatccattgcttgaaattattatgagatacaacgacaacggctatgaaacaaggtatttagcattaaatgaagcaacgatgaaaactgaaaatggctcaacacttgttgtggatgttaacttaagagggaaacactttgagcgatttagaggcgatggattatgtgtatcaacaccttcgggttcaacggcttataacaaagcgctaggtggcgcactgatacatccttcacttgaagcaatgcaaattacagaaattgcctcaataaataatcgtgtgtttagaacggtaggatcaccacttgtattaccaaagcatcatacatgtttaatatcaccagttaatcatgataccattagaatgacgatagatcatgttagtatcaaacataaaaatgttaattcaatacaataccgtgtagcaaatgaaaaagtgaggtttgcacgttttagaccattcccattctggaaacgtgtacacgattctttcatatcaagtgatgaagaacgatgaaatttaagtatcatatatcacaacaagaaactgttaaaaattttttagcacgacatgatttttctaagaagacagtgagcgccattaaaaataatggcgctttaattgttaatgatgaaccagtcacagtgcgtaagcaattaatgccaaatgatatattagaaattcatttaccgcaagaaataccgagtgttaatttaataccttatgctcgtaagctagaagtattgtatgaagatgcttttatcatcatagttactaaaccaaacaatcaaaattgtacgccttcgagagaacatcctcatgaaagtttaatcgaacaagtactatatcattgtcaggaacatggtgaaaatattaacccacatattgttacgcgtttagatcgtaatacaactggtatagtgatattcgctaaatatggacatatccatcatttattttctaaaggaaacttgaaaaaaatatatacttgccttgtatatggtaaaacccatacatctggtattattgaagctaatattagacggtcaaaggatagtattataactagagaagttgcctcggatggtaaatacgctaaaacatcttatgaagtaataaatcagaatgataaatacagtttatgcaaagttcatttgcatactggacgtacacatcaaattcgtgtacattttcaacatattgggcatccaattgtgggagattctttgtatgatggttttcatgacaaaattcatggtcaagtactgcaatgtacgcaaatatattttgttcatccaatcaataagaacaatatttatattagaattgattataagcaattacttaaattattcaatcaactctaattcacacagggggtgtaagtatgtcaatgaacacagatgaaaaagagcgtgttcaagaggaattatatgatgagacattattagatcaatacttagaaaatgatgatattgatcaatttagagatgaatttctagcattacacacatatgaacaaagtgagtattttgaagatactaccgatgaaaatagacaaaagatttttcaatatttatcacctgaagaggttgcaaatttctttgatcaattagatattgatgacgatgaatatgagttgctatttgataagatgaatgcgacatacgctagtcacatattagaagaaatgtcatacgataatgcagtagatattttaaatgagttgactaaaccaaaagttgctagtcttttaacattgatgaataaagatgacgcgaatgaaatcaaagcattacttcactatgatgaggatacggccggcggtattatgacgacggagtatttatcacttaaagcgcatacgcctgttaaagaagcgttattattggtcaaagcgcaagcgccagacgcagaaacaatctatgtgatttttgtcgttgatgatgatggtaaattagtaggtgttttatcgctaagagatttaattgtagctgaaaatgatgcttatattgaagatattatgaatgaacgtgtcattagtgtgaatgtagcagacgaccaagaagatgttgctcaagttatgagagactatgatttcatggctgtacctgttatagattaccaagaccatttgcttggtatcatcacgattgatgatattttagacgttatggatgaagaggctagtgaagactactctcgtttagccggggtttcagatatcgattcgactaatgattcaatcattaaaacagcattaaagcgtttaccatggttgattattttaacatttttaggaatgattactgcgacaattttagggagattcgaaaaaacattagaaaatgtagcgctactcgcagcgtttattcctattattagtggtatgtcaggaaattcaggtacacaatctttagccgtttcagttcgtaacattacgacaggggaaattaatgagcaaagtaaatttagaattgcattaagagaagcgggaagtggtgtattatcgggtgttgtatgttcaacaatattatttacaattattgttgcaatatatcatcagccacttttagcattaatcgttgcaggaagtttaacttgtgcgatgacggtggggacgtttgtaggttcgatgattccattattgatgaataagttgaatatcgatccagcagtggctagcggaccatttattacaacaattaatgatattattagtatgttgatttattttggtttagctacatcatttatggcttacttaatttaaggaggagttatggagtttttatctttagttattgttgttttagcagcgtttttaactccaataattgtcaatcgattaaatattaatttcttgccagttgttgttgcagaaattttgatggggattgtgattggaaattcatttctaaatatagtagaaagggattcaattctaaatattttatcaacgttaggctttatctttttaatgtttttaagtggtttagaaattgattttaaagcttttaaaaaagataaacgcgcacgtcaaggacaaaatgatgatgaatcctcaattccagggcatcttaatctagcgttaactgtatttgcatttattatgattatttcgattcttttagcgtatgtatttaaatggcttggattagtggatgatgtgttattaatggtcattatcatttcaactatttccttaggtgtagttgttccaactttaaaagaaatgaatattatgagaacaactataggtcaatttatcctattagtagcagtacttgcggacttagtaactatgattttattaacggtctatggtgcaatcaatggtcaaggcggcagtacaatatggttaataggtatattagttgttttcacagcaatttcatatattttaggtgttcaatttaaaagaatgtcatttttacaaaaattgatggatggtacgacgcaaatcggtattcgtgcggtgtttgcattaataatattattagtagccctagcagagggagttggcgcagaaaatatattaggtgcattcttagcaggtgtcgttgtttcattattaaatccagatgaagaaatggttgaaaagttagactcatttggttatgggttctttattcctattttctttataatggttggtgtagatttaaacataccttcattaattaaagaaccgaaattactaattatcataccgattttaatcgttgcatttatcatttcaaaattaattccagtcatgtttattcgacgttggtttgatatgaaaacaacgattgcatcagcatttttattaacatcaacattatcgctcgtgatagctgcagccaaaatttcagaaagattaaatgctatttcagctgaaacgtcaggtatattaattttaagcgcagtcattacatgtgtattcgttccgattattttcaaaaaactgtttccagttccagatgagtttaaccgtaaaattgaagttagtttaattggcaaaaatcaattaacgattcctatagcgcaaaatttaacatctcagttatatgacgtgacattatattatcgcaaagacttgagtgatcgtcgtcaattgtcggatgatatcactatgatagaaattgctgattatgaacaagatgttttagaacgactaggtctgtttgaccgagacatagttgtttgtgccacgaatgacgatgatattaatcgaaaagttgctaaattagccaaagcacatcaagttgagcgtgtcatttgcagacttgaaagcacaacggacgatacagagttagttgattcaggtattgaaattttcagtagctacttaagtaataaaatcttattaaaaggtttaattgaaacacctaacatgttgaatttattaagtaatgttgaaacatcactatatgaaattcaaatgttaaattataaatatgaaaatattcaattacgtaatttcccattcggaggagacatcatcttcgtgcgtattatccgtaataatgagtcgattgttccgcatggagatacacaattgcgatatggagatcgcttaattgttaccggtgctaaagaatacgttgatgaattgaaacaagagttagaattttatttttaacaataatgatattaaaatgcagacctattttagtacgacgtaaaattaatgattttaaaatgctagtatgtatatgattttgataaataaatactttttacgtaaatcaagtttgatacagaaaggactaaatcaaacatttatcgttgtaatacgtttaaataactttattaaaaagtcataatagtgttaaaatgtattgacgaataaaaagttagttaaaactgggattagatattctatccgttaaattaattattataaggagttatcttacatgttaaatcttgaaaacaaaacatatgtcatcatgggaatcgctaataagcgtagtattgcttttggtgtcgctaaagttttagatcaattaggtgctaaattagtatttacttaccgtaaagaacgtagccgtaaagagcttgaaaaattattagaacaattaaatcaaccagaagcgcacttatatcaaattgatgttcaaagcgatgaagaggttattaatggttttgagcaaattggtaaagatgttggcaatatcgatggtgtatatcattcaatcgcatttgctaatatggaagatttacgcggacgtttttctgaaacttcacgtgaaggtttcttgttagcccaagacattagttcttactcactaactatcgttgctcatgaagctaaaaaattaatgccagaaggtggtagcattgttgcaacaacatatttaggtggcgaattcgcagttcaaaactacaatgtgatgggtgttgctaaagcgagcttagaagcaaatgttaaatatttagcattagacttaggtccagataatattcgcgttaatgcaatttcagctggtccaatccgtacattaagtgcaaaaggtgtgggtggtttcaatacaattcttaaagaaatcgaagagcgtgcacctttaaaacgtaatgttgatcaagtagaagtaggtaaaactgcggcttacttattaagtgacttatcaagtggcgttacaggtgaaaatattcatgtagatagcggattccacgcaattaaataatatcattcaacagctttgttcacgttattatatatgtgagcaaagctttttttgcttttataataatcggactgatggaaaattatttgatatttcatctgactgatttttttatgcacaaaaaaatcgcttcaaaagctgtagtttcaacttttgaggcgatagtatcttatattattaaaagacatccacagaattagtccttaacattactgtttgctttatcaataatgcgttggcggtatttgaaaatattactaacaaccgttttaagtacagcatataatggcactgcaatcagaactaatgtaaagccacctaaatctcctgctgctaaaataacaacgataattgttaaaggatggatacttaaagatttacccattacatttggtgtaatgatattaccttcaagttggtgtgcaattaatgtaatgatacaaacccatataaatgtagtaggactatctataataccgagtattgctgcaggtgcaaatgataaccatgaacctaagaaaggaattaagtttgcgacaccagcaaatagtactaataaaggaatatatggtaagtcaataattgaataaccgatatataagaatatacctaaaataacactgacagttacttgaccttgaatgtaagattttaatgtaaagtttaaatcagttaataaatctacgaaaaatactttacgttcacctttgaaaaatttagcaacagctgggataaatttttcatggtcttttaacatataaattaagaagaatggaaccataatcaataagaagatggttgaaattaatgatgtaatgtactgtaatgaattagataaaatattagtaacgccatcacccattgatttaaccatatttgtaattctacttgttacatcttcaggtaatttatccatttgagctagtgcgaatttaataatttgctctgcttctttttgtagggcaggtgtttgactaattaaattgttgatatttgaaatgatgattggtgcaacaaacgcaacaattaagccgataatagcaaacaaagctaacatgattgttgttatactagcccatcttggaaaaccgactttttcaagtaagttttgaaaaggtagacagatataaaataaaaaaccactaattaaaaatggaagaaatacagaaccgatgattgtagctattggagtaaatacttcgtgcacttccataaatagtttgatgagaatgaacagcataatcagagcaatgccagttcggaaccaaaccttgtttaacataaacgatgttcctcctatttttctaaacttagttattatttagtatatcctaaatagcagtgcttaaaaaggttaatattttttaaatatacttaaattaaccattcactttctattttaagatatttactttcaatagtttgtgagacttttcaatgactcgtaagtctgcaaatggatcaaacagtaccaatttatatgaataacttattttaatagtaaacgtgattaaataatgaaatgatcatattattatttataagaatattctgaaaaatatattgaagtgtctcgtgcttaatcgtataatatttttatgtttaaacaatagggggaatcttatgattgaaaaattagtaacctttttaaatgaggttgtttggagtaagccattagtttatggtttgctaattactggtgtgctatttacattgcgtatgcgattttttcaagttagacattttaaagaaatgattcgattaatgtttcaaggagagaagtctcctaacggtatttcaagttttcaagcgatagccatgtctttagcaggcagggttggtacaggtaatattgtcggtgtatctactgcaatatttataggaggacctggtgcagtattttggatgtggattactgcatttttaggtgcaagtagtgcttttattgaatctacacttggtcaaatattcaagagagttgaaaataatgaataccgtggtggaccagcgtattatatagaatatggtattggtggtaaatttggtaaaatttacggaattatctttgctattgttacgattatctcagtaggtctgttgcttcctggtgtgcaatctaacgctatagcaagttctatgcacaatgcgattcatgttccacaatggttaatgggtggtattgttgtagttattttgggattaattatttttggtggtgtacgtagtattgccaatgttgcaacagccgttgtaccatttatggcaattatttacatactaatggctgtcattatcatttgtatcaatatacaagaagtgccagcgttatttgcattaattttcaaatcagcatttggattacaatctgcttttggtggtatcgttggcgcaatgatagagattggtgttaaacgtggattatactcaaatgaggctggtcaaggtacaggtccacacgcagcagcggcagcagaagtatcacatccaagtaaacaaggtctagtacaagcattttcagtttatattgatacattatttgtatgtactgcaactgctctgattatacttatttctggtacatataatgtgactgatggtacggttaatgcgaatggcacaccgcatttaattaaagatggcgggatttatgttgaaaatgcaacaggcaaagattattcaggaactgcgatgtatgcacaagccggcattgataaagcgttccatggcagtggttatcaatttgatcctactttctctggtgtaggttcgtactttattgcatttgctttattcttctttgcatttactactattttgtcgtactactacattacagaaacaaatgtcgcttatttaacgcgtaatcaaaataatcaagtttcatcggtatttattaatattgcacgtgtgattattttgttcgctacattttacggtgcagttaaaacagctgatgtagcatgggcattcggtgatttaggtgtaggtctaatggcttggttaaatatcattgcgatttggattttacataagcctgccgtaaatgctttaaaagattatgaaattcaaaagaaacgtttaggcaacggttataatgcagtttatcaacctgatccgaataaattacctaatgctgtcttttggttgaagacatatccagaacgtttaaaacaagcacgtgtcaaaaagtaatctacttttgtttatagtatatgtagtgatcatttgataaaaaagaaaaagtattgagaattttaggtgctcagaaatttgaattttaaaatatagtgtctcttggtacaataataatacaattactagggggcacttttttatgttggaatttaaagctggaaagattaataaacatgttttatatagtgatattttaaatagagatgtcacactaagtatttatttgccagaatcttataatcaacttgttaaatataatgtcattctttgctttgacggattagattttttacgtttcgggagaatacaacgtacatatgaatcgttaatcaaagaagcgcgtattgatgatgcgattattgtcggattccattatgaagacgttgataagcgtagagaggaatttcatccacaaggaagtcgttctcatttaactattcaatcagtcggtaaagaaatattgccatttattgactcgacgttttctacactgaaagtaggtaatgcaaggttattagtaggggatagtttagcgggtagtattgccttattaacggcgttgacctatccaacgatctttagtcgtgtagcaatgttaagtccacattcagatgaaaaagtattagataagctaaatcaatgtgctaataaagaacaattgacaatttggcatgtcattggtctagatgaaaaagatttcactttaccaacaaatggtaagcgtgccgatttcttaacaccgaatagagaattagctgaacaaattaagaaatataatataacttattattacgatgaatttgaaggtggtcaccaatggaaagattggaaaccattgctgtcagatatattattgtattttttaagtaatcagtcaccggatcaattatatgagtaatatgttcttatataactgattattgtagtggttttatcttcaaaagaggggcaattttagggcacttaggtattatattaagagaaaggcatattcctgcaataacaacggataaagagcttcaagaaggtgaaatgtatagaatagtgaaggggggaatttacagtgaataataagcttatatatacctcttatgatggtgataacataccattgatagatagttttattaaacttgttattgattttaaatatattccaataaatccaactaaatcattaggatattatatatctacatcgattcatgacaatgacaaaggtgagtgtttaagagactgcttgtctttggaaatgatttgtgatgaactttgggtattcatagacaataataaatatattccagaaggagttcggttagaaatagccacatggttaaaatataaatcctctccagttaagtatataagcataccttctttattagagaattcgagtataaatgacgatttatttttagactttgatgattcaaatatacttaaagaaaaggaaatttccgaactagtaccgaaaaaaagtaaattaagacctgtaaattgtattaatatacttcccgaacaccataaatatatagactgggtaaagtatcatttattttacaacaaattcgtacctttggattatttaagtataaagccctatatttattttgataatatagaacattataaaagtgagttatcgctattgaatgaacgatgtaataacatttctgttatgccatattatgtgagtgaagataattttaatttatctttttcagaatgtaaaatacctaaatatattaagaaagattgggctataacaacaatggggaataaaaattaacatggatatatcattaaatttcaatcattatattgatttaaaaaagagtattaaaaatttatgcttaatgaaaaagtttgagccctatgtaaccaatgaaaattatgattttattgaaatgcctttggtagtagatggaaattatgtgctcttaaaaatttatcaagaaaaagacgctttaattaaacttcattatcaggaagtattaaactctaatcgaaaaagtgtaatacaagaaagtgatatagttagaatttcacgaagcatacttaatgaagctcttgatatcaatagtaatataaaatataaatctgatacttttggattaactattatatccgatgcagataattacacaacattaatacggactatacttgctcagcaagtgagcatagaacaagccaataaactatttttattatttattaatacttatggtgaaatttttgaactaaataacaaagaatacacttttttaaattgggataaaatattcagtcgaatatataaagaacaaaaggttttagtaggtacgactaataatagaaagcaggctatcataactcttgctgaattacatataaaaaacggcttaagagaaaatgttttacaagttatttcaagtataaaaggtataggtgcttggacagtgcaaatgtttatgctatttcaatttcctcacgtagcttttgaaaatattcctgtagcagacataggtttgcacagggccatagaaaaaatcatgatcttccacataaatcgattgataaaagtaagggagaatcttacttccaaaacatgaaatctatagatgtgtttaaatattggtatatatacatggttgaatagatgtttaagcagtttgttgtacagtaaaaataaaacttattaaatataaggattgcttaatctcttttctaattattcaactcccgatgtaatattctgtaaattactttacagaatatgtttactttacgtactttttaaatgaaaggtaagagtagataaactttttaaagacctatttctgaaataatagaagatactactttatttatataattgttggattatcttaaataggcagtatagtggctatttatcatgccagttctatcatttttttcgaaaaaggaattattaagatgattatcacattactaccggaaaggtttaaggtaattgatgtagaagattctcaatatattttttctgcgatacatttttgtatctataaaccaattacatacgaatgtggtatggagttctttaactaaaaataatatataactgttactagaaatcaatattttttgtttattatagaatcctatcacaacaagcttaaatgaatattgtaatagaaacgcactgaattgtttaaaggtttaactagactgtctagataaatttgacgatgatatagtctggtctataatataatttataaaagattttactgtttaatttaatttaaatttgtcgaaattgcaaaagatgtataatgaattatttttaatgtaacggttttcaaagaaatttgatataatagcaataggttaaacaaaggaggaattcagatgattttaggattagcattaattccatcaaagtcatttcaagaagcggtggattcttaccgtaaaagatatgataaacagtattcacgaattaaaccacatgtgacaattaaagcgccatttgaaattgaagatggtgatttagattctgtcattgaacaggttagagctcgtattaatggtataccagcagtagaagttcatgctacaaaagcttctagcttcaaaccaacgaacaatgtgatttactttaaagttgcgaagacggacgacttagaagaattgtttaatcgctttaatggagaagatttctatggagaagctgaacatgtttttgtgccacactttacaatagcacaaggactatctagccaagaattcgaagatatttttggtcaagtagcattagctggggtagaccataaagaaattatcgatgaattaactttgttacgttttgacgatgacgaagataaatggaaagttattgaaacgtttaaattagcttaagtaacataatagtattgttaatcgtagtatgtttgaattaataagaaaatcaggctgggacataaatccctaaaaaacagcagtaagataattttcaattagaaaatatcttactgctgttctctatttatacaatacttcgtattgaatggcttcgctatgcccatctggcacattactgtaaaattctataaatagaatttttgatgatgggtcccttcctagggtgccgtctcagccaccccaaccggcacattgttgtaagctgactatatgtcagcttctgtgttggggcccctgtcttcgactggcactgctccctcaggagtctcgccattaatactacgtattaacatgtaattttactttgaaatactttaaaaaaataagacactttgcccaacttgcacataaatgtaaaattcaataaaatgaattttctgtgttggggtcccttcgtataatttaataaataccactaaactaaattaacgaggtgccttatgtataaaaattataacatgacccaacttacactacccaatagaaacttctgttagaattcctcaaaaatgatatttcgcgatatgttaatgaaattgttgaaacgatacctgatagcgaaattcgatgaattcagacatcatcgtggcgcaacatcctatcatccaaaaatgatgttaaaaatcatcttatatgcatatactcaatctgtattttctggtcgtagaatagagaaattacttcatgacagtattcgaatgatgtggttagctcaagatcaaacaccttcttataaaactattaatcgttttagagtgaatcctaatactgatgcgttaattgaatctttatttattcagttccatagtcaatgtttaaagcaaaatcttattgatgataattcaatttttattgatggtacaaaagtagaagctagtgccaatagatatacatttgtgtggaagaaaagtattcaaaaatcacgaatcgaaattgaacgaaaattcaaaagcattatatcgtgaacttagttgaagaaaaaataataccagagataaaagaagatggagatagcgatttaacaatagaagaaatagatttaattggtagtcatttagataaagaaatcgaagatttaaatcattctattgagaacgaagattgtactcaaattagaaaacagacccgtaaaaaaagaactgagattaagaagttcaaaaagaaatttgatgattattccgaaagaaaaagtaaatatgaagaacaaaaatcgattcttaaagatagaaatagcttttctaaaaactgatcatgatgcaactttttatgagaatgaaggaagaccatatgaaaaatggccaacttaagccaggatacaatttacaaatagcgacaaattctcaatttgttttatcctatgacctatttcaaaacccgacagatactagaactttaattccattttttaacaatgattcaaaataccttcggttatttacctggagtatattgtagctgatgcaggttatggtagtgagcaaaactatatggctattatagatgattttaataaaacgccacttattacgtatggcatgtttattaaagataaaactagaaagtttaaaagtgacattttttaacactcaaaaattggaaatatgacgaacttaatgatgaatttatatgtcctaataacaaaagaataggtttttaaaagatatgcataccgtaatgatagatatggttttaaacgtgacttcaagctatatgaatgcgatgactgttcagcatgttctttgaggcaacaatgcatgaagccaaattcgaaatccaataagaaaatcatgaagaattataattgggaatactttaaagcccaaattaatcaaaagctttctgaaccagaaacgaaaaaaatctatagtcaaagaaaaattgatgtagagcctgtttttggatttatgaaggctattttgggtttcactcgaatgtcagttcgaggaataaataaagttaaacgagagctaggttttgtattaatggcacttaatataaggaaaatagctagctcgacgagctgtatattatcaaatacaattttaaaaaaagctgatttctatcaaataattaatagaaatacagcttttttacattgcctaagaacttaatgtcccagcctcattttctttattttaaaatacgttttaaccttacttagctttttctctatttgctataaagtagcttccataaaatacagctaagactaaaaagattaatgccgagaaataaaatgtattgtttaaattgttggtaaattgtgtaattaatccgccaaataatggcccgatcattgagccgaatccttggatactattaaaaacaccccaagtttcttcttgttcatctgatttgataaatcgtgccataaaggtattccatgctggtaataagatgccatacattagaccgatagctaaagcgataatccacacgatgtgaatattaacaatcatagatagagtgaaaattaatatcatgtataaaataaatccgcttagaataacaccatacataaagtttctgctgcggttatctattagtttcgataaaaatagcatcgaaactgcacagccgataccaccaataatgattgcaacagtatattcaattgtgcttacgttaataaccttagtagcatatgttggtaatataggaactagggcagcaattgcggcaccttgtaaaagaataccagggaacaacaataaatggcgctttgtcacatcaacaatttgtctcaattgagctttaactggacgagtattataatttgttaactttacatcgacaaaataatataatatccatgcaattaaaacgactaaagacatcatgaaggcaaagcgtgttgggtgcactttgataagtagattcataaaaaccatacctaccaataggcctaacaaccatgaaaaataaacatagcccatttgtttgccacgtttatcttcttcaacactggataacataatgacccaaataggactaactgcaataccgagcatcatagcactaaatatgattacaaaaggtgatgctggaaaccaaataactaaaaataaacttgtaaatgctaaaataaatccagtcgttaaaacgatttttgtgccgaattttttcagtaaaaatcctataacaaagtttgtagatgcatcagcaataaaatgtattgaaaatgctagagacgttattgctacagcaatggatgtaactgttggcaagaaattaatatagcttaggatatacatgcctctcgcaaattccattaaaaataagataataagcattaaaatgaaatttttatgattagcgtaattatttaacgaagaatcttgcatataaaggaacctttccataaatctcttgtggttgtgatgaatgaccgattaaatcaagtaagtctcgacatattgtctgtgtagcatacttaattttatcttgttccattgtactaatcatgttagttaattgctcattaccatttgttaaactagctacaatttttattgcttcttctggagtatcagcgattttaccaaagcctttttcttcaaagtaaagggcattttcaagctcttgaccaggtgcaggatttaggaaaatcattggaatacaacgggcgaaaccttcagttattgtgataccaccaggtttcgtaatcataagttgacttgatgccatccattcattcatgtgtttggtataacctagaatcaatacattctcgttagatttaaacttagctgttaaagaacgctttagctctttgcttttaccacaaatcataactacttgtgcatttgcacttttcgctaatatatcagtgatcatcgtgtcaaaacctttagatacaccaaatgcaccagctgacattaaaatagtttgcttatctggatctaagttgttgtctattaaccactgcttttgattaataggtgtttcaaatttgttatcaataggaataccagtcactttaactgttgaaggatcaatacctacgtctatgaagtcttgttttgtttcttttgttgccacataatatcttgttgaatacggcgtaatccagtttttatgtaagcgatagtctgtcatcactgtagcaactggaatattaatgttaaattgttcagttagtaccgacataactggtgtaggaaatgttaataatattaaatctggcttttcttttatcaataaattaattaatttattaagtccatagtatttgtagaaacatttgtctagtttatctgggcggctgtaataaaaccctttgtacatatttctaaaatatttaaagctattgatataccattttttacaaatagaagtcaagattggatgagcttccataaataaatcgtgctcaatgacgcttaaatggtctagattcatatcattaagttgattaacgatactctgtgtaacttgcatatgaccgttaccgaatgagccagtaataatcaatatctttttattttgagtaaccattaatagccaccctccgttagtttgaaaattttatttaagtgtaacttattttacggcattataaaagaaataaagacgcaaagtcgttacatttatagcaattttaatcaatagatgaattgatacaaaataaaacgttattttataaagcaatttattgttctatgttttatttgtatatttaaaattatccagtatacaattatagcatatttttggaaacaattatgatattataccatgttacaagatggttttaataatttaagatgagccataattgtgaaactaattcataataccttatgttttatttttaatagtagaaattagaaaatgctgattagtaggatataacagtgaaattataaatttattaacatcaacaaaacgtgtataataaacatattgtagaaaaaggagcggttcagtttggatgcaagtacgttgtttaagaaagtaaaagtaaagcgtgtattgggttctttagaacaacaaatagatgatatcactactgattcacgtacagcgagagaaggtagcatttttgtcgcttcagttggatatactgtagacagtcataagttctgtcaaagtgtagctgatcaagggtgtaagttggtagtggtcaataaagaacaatcattaccagctaacgtaacacaagtggttgtgccggacacattaagagtagctagtattctagcacacacattatttgattatccgagtcatcagttagtgacatttggtgtaacgggtacaaatggtaaaacttctattgcgacgatgattcatttaattcaaagaaagttacaaaaaaatagtgcatatttaggaactaatggtttccaaattaatgaaacaaagacaaaaggtgcaaatacgacaccagaaacagtttcattaactaagaaaattaaagaagcagttgatgcaggcgctgaatccatgacattagaagtatcaagccatggcttagtattaggacgactgcgaggcgttgaatttgacgttgcaatattttcaaatttaacacaagaccatttagattttcatggcacaatggaagcgtacggacacgcgaagtctttattgtttagtcaattaggtgaagatttgtcgaaagaaaagtatgtcgttttaaacaatgacgattcattttctgagtatttaagaacagtgacgccttatgaagtatttagttatggaattgatgaggaagcccaatttatggctaaaaatattcaagaatctttacaaggtgtcagctttgattttgtaacgccttttggaacttatccagtaaaatcgccttatgttggtaagtttaatatttctaatattatggcggcaatgattgcggtgcggagtaaaggtacatctttagaaacgattattaaagctgttgaaaatttagaacctgttgaagggcgattagaagttttagatccttcgttacctattgatttaattatcgattatgcacatacagctgatggtatgaacaaattaatcgatgcagtacagccttttgtaaagcaaaagtttatatttttagttggtatggcaggcgaacgtgatttgactaaaacgcctgaaatggggcgagttgcctgtcgtgcagattatgtcattttcacaccggataatccggcaaatgatgacccgaaaatgttaacagcagaattagccaaaggtgcaacacatcaaaactatatagaatttgatgatcgtgcagaagggataaaacatgcaattgacatagctgagcctggggatactgtcgttttagcatcaaaaggaagagaaccatatcaaatcatgccagggcatattaaggttccacatcgagatgatttaattggccttgaagcagcttacaaaaagttcggtggtggccctgttggtcaataaaagacttattgataaaggtaaaactattgatgtttatttattcgaagcattaaatgaccagataatcattgctataccagattggttttggtcatatcagatggcaatgacattagatgaagaaacttgttttgaagcaatactcatgcaattgtttgtttttaaagaagaggaagaggcagaatcgattgcatcacaactaacagattggatagaaacatataaaaaggagaaagactaatgaacttaaagcaagaagttgagtctagaaagacttttgcgattatttcacatcccgatgcagggaaaacaacgttaactgaaaaactattgtacttcagtggtgccattcgtgaagcgggtacagttaaagggaagaagactggtaaatttgcgacaagtgactggatgaaagttgaacaagagcgtggtatttctgtaacaagttcagtaatgcaatttgattacgatgattataaaatcaatatcttagatacaccagggcatgaagacttttcagaagatacgtatagaacattaatggcagttgacagtgctgtcatggtcattgactgtgcaaaaggtattgaaccacaaacattgaagttatttaaagtttgtaaaatgcgtggtattccaatctttacattcattaataaattagaccgagtaggtaaagaaccatttgaattattagatgaaatcgaagagacattaaatattgaaacataccctatgaattggccaattggtatggggcaaagtttctttggcatcattgatagaaagtctaaaacaattgaaccatttagagatgaagaaaatatattacatttgaatgatgattttgagttggaagaagatcatgcaattacaaatgatagtgcttttgaacaagcgattgaagaattaatgttggttgaagaagcgggtgaagcctttgataatgacgcgctgttgagtggagacttaacacctgtatttttcggttcagctttagctaactttggtgtacaaaatttcttaaatgcatatgttgattttgcgccaatgccaaatgcgagacaaacaaaagaagaggttgaagtaagcccgtttgatgattcattttcaggatttatctttaaaattcaagccaacatggaccctaaacaccgtgatagaattgcctttatgcgtgtcgttagtggtgcatttgaacgtggtatggatgttactttgcaacgtactaataaaaagcaaaaaatcacacgttcaacgtcatttatggcagacgataaagaaactgtgaatcatgctgtagcaggcgatatcattggactatatgatactggtaattatcaaattggagatactttagttggtggaaaacaaacctacagtttccaagatttaccacaatttacgccagaaatttttatgaaagtttctgctaaaaacgtcatgaaacagaagcatttccataaaggtattgaacaattagtacaagaaggtgcgattcaatactataaaacattacacacaaaccaaattattttaggtgctgttggtcagttacaatttgaagttttcgaacatagaatgaaaaatgaatataatgttgatgttgttatggagccagtaggccgtaaaattgcacgttggattgaaaatgaagaccaaattacagataagatgaacacatcaagatcgattttagtgaaagatagatatgatgatttggtattcttatttgaaaatgaatttgcaacaagatggtttgaggagaaattccctgaaattaaattgtatagtttactttaacggctcaattgtataatcgaatttgttacattaaaaataattgtttcgttgaagaaaaataaattgtatattttaaaagaaaaaggtatactatgatgtatcaaatgaataacctatggcattctgtcagaggggagtaacttaagaatcatgaccgtataaatgattcgacactttatcgtcattacgaagatatcttccggtaaagtgggcaatttaaattgcttagtgagacctttgctatttatttagcataggtctttttgtttgtacttaacttatttatttaaaggagttgtacattttaatggatccaagtttgatcttaccttatttatgggtacttgtcgttttagtatttttagaaggcttattagcagcagataacgcgattgttatggctgtaatggttaagcacttaccacccgaacaacgtaaaaaagctttgttttacggtttgttaggtgcatttgtatttagatttttagcattattcttaattagtattatcgcgaacttttggtttattcaagctgcaggagcagtttacttaatttatatgtcaatcaaaaatctgtggcagttctttaaacacccagaaattgaaagtcctgaagctggagatgatcatcattatgatgaatctggtgaagagattaaagcaagtaacaaatcattctggggaactgtgttgaaaatagaatttgcagatatcgcatttgccattgattctatgcttgctgctttagctattgctgtaacacttcctaaagttggtattcactttggtggtatggacttaggtcagttcgtagtcatgttcctaggtggaatgattggtgttattttaatgcgttatgcagcaacatggttcgtagagctattaaacaaatatccaggacttgaaggtgcagccttcgcgatcgttggttgggtaggtgttaagttagttgtcatggtattagcacacccagacattgctgtattgcctgagcacttcccacatggcgtattatggcaatctattttctggacagtactaattggattagtaattatcggttggttaggttcagttgttaaaaataaaaaatcgcataaataattgatgtgaagcggacaatcttaatttagtttaaggttgtcctttttcatttaattgagtgatttatgaaaaatggattttgaagaatatgaatcaaaatatgcgatatagcattaagaaaatgtgccttttatatttagcattttttcaatagaaattatatagattttaaagcaaattaagtgttaatgtgtcataatgaaaagtgattttattgaatggagtggacattagtggatattggtaaaaaacatgtaattcctaaaagtcagtaccgacgtaagcgtcgtgaattcttccacaacgaagacagagaagaaaatttaaatgaacatcaagataaacaaaatatagataatacaacatcaaaaaaagcagataagcaaatacataaagattcaattgataagcacgaacgttttaaaaatagtttatcatcgcatttagaacagagaaaccgtgatgttaatgagaataaagctgaagaaagtaaaagtaatcagggtagtaagtcaacatataacagagatcattatttaacagacgatgtatctaaaaaacaaaattcattagattcagtggaccaagatacagagaaatcaaaatattatgatcaaaatactgaagcgactttatcaactaattcaaccgataaactagaatcaactgacatgagaaagctaagttctgataaaaacaaagttggtcatgaagagcaacatgtactttctaaaccttcagaacatgataaagagactagaattgattttgagtcttcaagaactgattcagatagctcgattcagacagagaaaataaaaaaagacagttcagatggaaataaaggtagtaatctgaaatctgaagtaatatcagacaaatcaaatacagtatcaaaattgccggaatctgatgatgaagtaaataatcagaagccattaactttgccggaagaacagaaattgaaaagacagcaaagtcaaaatgagcaaacaaaaacttatacatatggtgatagcgaacaaaatgacaagtctaatcatgaaaatgatttaagtcatcatacaccatcgataagtgatgataaagataacgttatgagagaagatcatattgttgacgataatcctgataatgatatcaatacaccatcattatcaaaaatagatgacgatcgaaaacttgatgaaaaaattcatgtcgaagataaacataaacaaaatgcagactcgtctgaaacggtgggatatcaaagtcagtcaagtgcatctcatcgtagcactgaaaaaagaaatatggctattaatgaccttgataaattaaacggtcaaaaaccaaatacaaagacatcggcaaataataatcaaaaaaaagctacatcaaaattgaacaaagggcgcgctacaaataataattatagtgatattttgaaaaagttttggatgatgtattggcctaaattagttattctaatgggcattattattctaattgttattttgaatgctatttttaataatgtgaacaaaaatgatcgcatgaatgataataatgatgcagatgctcaaaaatatacgacaacgatgaaaaatgccaataacacagttaaatcggtcgttacagttgaaaatgaaacatcaaaagattcatcattacctaaagataaagcatctcaagacgaagtaggatcaggtgttgtttataaaaaatctggagatacgttatatattgttacgaatgcacacgttgtcggtgataaagaaaatcaaaaaataactttctcgaataataaaagtgttgttgggaaagtgcttggtaaagataaatggtcagatttagctgttgttaaagcaacttcttcagacagttcagtgaaagagatagctattggagattcaaataatttagtgttaggagagccaatattagtcgtaggtaatccacttggtgtagactttaaaggcactgtcacagaaggtattatttcaggtctgaacagaaatgttcctattgatttcgataaagataataaatatgatatgttgatgaaagcttttcaaattgatgcatcagtaaatccaggtaactcgggtggtgctgtcgtcaatagagaaggaaaattaattggtgtagttgcagctaaaattagtatgccaaatgttgaaaatatgtcatttgcaatacctgttaatgaagtacaaaagattgtaaaagatttagaaacaaaaggtaaaattgactatccggatgtaggtgttaaaatgaagaatattgccaatctaaatagttttgaaagacaagcagttaaattgccaggaaaagttaagaacggtgttgttgtagatcaagttgacaacaatggtttagcagatcaatctggtctgaaaaaaggtgatgtaattactgaattagatggcaaacttttagaagatgatttacgctttaggcagattatatttagtcataaagatgacttgaaatcaattacagctaagatttatagagatggtaaagagaaagaaattaatattaaactaaaataatgttgaggtgaacaacgtgtcaatttttagccagtttttaaaaagatcaagccctcaacaaggtattgtattgtactatatcgtcgcaattgtcgttgcatttttattattaaacttaccgtatgttcataaaccaggtgtagaagtaaatccaattgacacattatttgttgccgtatccggaattagtgttactggattgtctccgataagtattgtcgatacctattctacatttggacaattaattatcctcgtgatattaaatattggtggaattggcgtcatggcaattggtacgatgttatgggtggtactaggtaaacatattggaattagagaacgtcagttaattatgttagataataacaaaaacacaatgagtggtaccgtcaaattgattattgatattgtaaaatcaatatttgtaatcgaactcgtaggagccatgttattagcattttacttttatcgagataatccagatttaaaatatgcaatcatgcaaggtgtttttgtttctatttctgccactaccaatggtggattagatattacaggtaagtcattaattccttatgcacatgattattttgtacaagcgatagttatatttttaataattttaggatcaattggcttcccagtattattagaagttaaagcttatattcaaaatagggttactaattttagattttcattatttactaaaattacgacatcaacatatttattcctatttattgttggggtattagccattctattatttgaacataaccatgcgttcaaaggattaagttggcatcaatcgttattctattcactgtttcaatcagcgactacaagaagtgcgggtcttcaaacaattgatgtgacaacactaagtgaccctacgaatattatcatgggtattttaatgtttataggttcttcaccaagttcggttggtggcggtattcgtacaacaactttcgctattttaattttgtttttaattaactttagtaataatgccgataaaacatccataaaagtatacaatagagaagtacacatcatggatattcaacgttcatttgcagtatttacaatggcgacaattttaacatttttaggaatgctaattatatcagctactgaaaatggtaagcttacatttttacaagtattttttgaagtcatgtctgcatttggaacttgtggactatcgcttggtgtcacaagtgatattagtgatatttccaaggtcgtactaatggtactcatgtttataggacgtgttggcttaatatcatttatcattatgatagcaggacgtcgagaaccagataaattccattatccaaaagaacgtattcaaataggataatataatagcaatctaagtttagttaatgtagattttaaccggaacttagattgcttttttagtttgtatttttaacttattttataagacgattggttttgaaaatggtaaactagtaacaatgagaggtgtaacatgatggaaaaaaatgaaaacattaatgtagagattttaactacgtcagatatgcatagtcatttcttaaatggtgattatggttcaaatatttatagagctggtacttatgttaaccaagtaagagcacaaaatcatcgcgtcattttattagatagtggcggaagtttagctggctcgttagcggcctattattatgctattgttgcaccttataaacgacatccaatgataaagttgatgaacagaatgcattatgatgctagcggtgtgagtccaagtgaattcaagtttggtttatcatttttaactcgttcaattgctttggcacgttttccatggttatcagcaaatattgaatacaatgttactaaggagccttatttttcaactccatattgtattaaacattttggtgacttaaaaattgctatcgtaggcgttacagcagatggtttaatggaaaatgagtattctgaaatggagcaagatgtatctattgaaaagacattagtggcctcaaaacgatggattagatatatccatgaagttgaagagccagattttttgattgtaatttatcatggtggattgaataaaattagtaatagcacgaaaaataaaaaggcaagttcgaatgaagctgaaaaattaatggaagaactcggtgttatagatttaatgattacagctcatcagcatcaaacaatagtcggtcaagatcatgaaacgtattatgttcaggctggtcaagatgcaaaagagcttgtacatctttcgattaattttaaaaagagaacaacaacttatgatgttgaaagtattgattctaaagtgattgacttaaatgagtatgaagaggatcaagaattattagatttaacattctatgatagaaaagcagtggcttattggtcacaggaaatcataagtgataaaggtttgatgttatcagtaaatgggttacaagatttagtctgtcaaacacatcctttttcgcaattattacatgatgcaattcaccttgcatttgataatgatataacatgtgtccacgtgcctatgaacggagagaaggggttgagtggacagattcgaaatgaagatttgtatcatgcatacccatatccagataagcctatggatatgacaattagtggtcaaaatatcaaagatatattggagtatagttattcacatttagattttgttaacgagcaattaagcttaacaattattgatgaaacattatgtacaatgtggcaaggattcaattatgagattgatatgaatcaagaacctgggcaacgagtaatgttagatcaaattgatttgactaagagttatagagttacaatgactgactattgttatcgtaactacaagaattatttaaaaaatgctattatacatgaatcatacgatgaaacgatgagtacattaattgcagagaagttaagaggtccgaattatcgtatttcatgtagtgataattttgtagttaaaaacaggtaaatattgctatgtaataaattaattataagtttaacaagtataaaaacctttcttagagaagattaactaggaaaggtttttagaattataaaattgatataaaagaacattgaaattctcattcattatatatataagtaaacaaaaaagcttaaatggtatataccatttaagcaagtaacggaaacggagggattcgaaccctcgcgccgctttcgcgacctacacccttagcaggggcgcctcttcagccaacttgagtacgtttccaatggctccacaggtaggactcgaacctacgaccgatcggttaacagccgatagctctaccactgagctactgtggattaatttgtatgtgtttgaatatcaagcacaaatattattataacaagattaagttaatttgcaatagataccttaaaaaaatatgcagaacatttacactatatttataaaacattccgcatattttaaaaataaacaatttatttatcttcaaataaagaatagcgtgtcaatgcttcaaacacattcaatgtggctttattataatctattggttggtcgggattttttgatatcatgcgagattgtttatctaccatataatagtaaaaaatggaattgttatattgatgccataaactgtggtatgaaacatgaagaatgattgattcattattaataaatgtcactttacatttacgattttttaattctttaatactttcgatataatgcatatttaaccaaatattttcattttgtctgtcagaatgtgttgggaaaaaataagttggaaataatggtgttagtaaaataggtggtttactagaaatgccagtgatgcggtttgtctctgctttcttgccaagataagtattaccataaaatttgcaagagcgttcaatgattttctggactttaaaaggattttgaatacgcgttttgtcaaaccgaattatttcgctaccatttctttgatcgtcatcatcaaatgctggtcgaataaccatgtctcctttgcgtatcacataaatattttgagaatacataagcaaaacctcgctttattaagttttaaaccattaatataaaaatacaattaatgatataaagatattttataataaaattctgagttgtcaagttattattttggtgaaaatgtacaatattttttaactaatagtcagaatattcattgatttcaaaattagaaaaatgtatacttattataaattaaagaaaggtagtggtttctatgaaatacaatactaatgttaaacatacaactttagaagcgtttgtcacaaccgtcaatgatttgggtattgaattaattatcaatgaagcacttcgagaggtaagaaaacgacagctcatagaacttatagatgacgcactcgtcaataaagatgaagcagcatttaatcaatatacggcagaatacaaaaatttggaggcatttctcggtgaataacattgattcgaattctataacgcaatcataaaaggactattcttaacatctcatacatgtaagaatagtcctttaatcgtttatgacattaatctaattaattcatgtctatctatgtcaccgaaatagtgatataaatcatattctgatagtgcttcttctatgtgctcaaagtcgtgtagacagccaactaatgcattttcaaggtcagtgacatctccgacaccaaagaaatcaccgaaaatttttgcatgttcgattttacctcgtttaacatcaaacttgatttgtacaaatcctttttcaaatttttcctcgcgttcaaagttatatttagggtttcttccataattccattcccaagttctatatttgtcgttacttaacttttcaatattttcccaatcttcatccgttaatttatattcttctacttcagtttctccaaagatagttttcaagatgatttttttaaattcttcaatttctaaagggtcatttaaaaattcttgaatgtttgctactcgtttacgaacagatttaataccttttgatttaatcttagctggattaacttttagtgcattctgaacttcgtctaaatcactatttaacatcaacgtaccatgactaaacattctatttttaactttaaccatagcattccctgagattttcgcttgtccaacttgaatatcgttacgaccagttaattcagcatttacgcctaaagattgtaatgcttgaacaattggttcagtgaatttttggaaattgtggaaactgttgccatcatcatctgttataaaactaaagtttaaattgccagtatcatgataaacagcgccaccaccagaaattcttctaactacatcgatgttatgagcatctatatatgtctgatttacttcctctatcgtattttgattctttccaacaatgatagatggtctatttatgtaaaataaaaagtaactttcttctgctggtaaattttttaaaacatattcttccattgctaagtttaaagttggatctgtaatattattattactaatgaatttcattacaatctctcccttatatctatatatattctctatttatttatgccttaactttgctcaaaatgccaattatatactcacaaatcattctaaatatcggcttaaagttacattttattatttttgattgttaatagtttatttgttaagtgaattttagtacaatataatttagttatgatttaaggaggacttaaaatgactgttgcagaagtgggtaacattgttgagtttatggatggattaagaggtcgtgttgaaaaaatcaacgataactctgttattgttgacttaacaattatggaaaattttaatgaccttgatttaccggaaaaaactgttatcaatcataaacgatataagattgttgaataagaaggtaagttataatgaataaaatctcgaaggctttaacttggtttattataagtttcattatatttcatctcatattatttattatgtggggcgaacaccaagaatactggtatttatatacaggtataatgctaattgctggtatcagttatgtgttttatcaaagagatattgaatctaagcggttgcttacatcaattggtgttggtattattacggcaattattttaattatgcttcaacttttattctcacttataacttctaatttaagttatagttcattaattaaagaattagcaagaacaggtgtcaattggaagtggcaaatgttagtaactttactttttgtcattccatgtcacgagttatatatgagaactgttttacaaaaagaattaacacatttttcaataccgaaatgggtagctatattaataactgcaatttgttcaagttcattatttatttatttagataattggtggatagtaacatttatatttgttgcacaagtgatattatcattaagctatgagtatactcgacgcatagcaacaacatccgttgcgcaaattgtagctattatattgttattaatttttaatgcttaaatacaggctgggacataaatccctaaaaaacagcagtaagataattttcaattagaaaatatcttactgctgttctctatttatacaatacttcgtattgaatggcttcgctatgcccatctggcacattactgtaaaattctataaatagaatttttgatgatgggtcccttcctagggtgccgtctcagccaccccaaccggcacattgttgtaagctgactatatgtcagcttctgtgttggggcccctgtcttcgactggcactgctccctcaggagtctcgccattaatactacgtattaacatgtaattttactttgaaatactttaaaaaaataagacactttgcccaacttgcacataaatgtaaaattcaataaaatgaattttctgtgttggggtcccttcgtataatttaataaataccactaaactaaattaacgaggtgccttatgtataaaaattataacatgacccaacttacactacccaatagaaacttctgttagaattcctcaaaaatgatatttcgcgatatgttaatgaaattgttgaaacgatacctgatagcgaaattcgatgaattcagacatcatcgtggcgcaacatcctatcatccaaaaatgatgttaaaaatcatcttatatgcatatactcaatctgtattttctggtcgtagaatagagaaattacttcatgacagtattcgaatgatgtggttagctcaagatcaaacaccttcttataaaactattaatcgttttagagtgaatcctaatactgatgcgttaattgaatctttatttattcagttccatagtcaatgtttaaagcaaaatcttattgatgataattcaatttttattgatggtacaaaagtagaagctagtgccaatagatatacatttgtgtggaagaaaagtattcaaaaatcacgaatcgaaattgaacgaaaattcaaaagcattatatcgtgaacttagttgaagaaaaaataataccagagataaaagaagatggagatagcgatttaacaatagaagaaatagatttaattggtagtcatttagataaagaaatcgaagatttaaatcattctattgagaacgaagattgtactcaaattagaaaacagacccgtaaaaaaagaactgagattaagaagttcaaaaagaaatttgatgattattccgaaagaaaaagtaaatatgaagaacaaaaatcgattcttaaagatagaaatagcttttctaaaaactgatcatgatgcaactttttatgagaatgaaggaagaccatatgaaaaatggccaacttaagccaggatacaatttacaaatagcgacaaattctcaatttgttttatcctatgacctatttcaaaacccgacagatactagaactttaattccattttttaacaatgattcaaaataccttcggttatttacctggagtatattgtagctgatgcaggttatggtagtgagcaaaactatatggctattatagatgattttaataaaacgccacttattacgtatggcatgtttattaaagataaaactagaaagtttaaaagtgacattttttaacactcaaaaattggaaatatgacgaacttaatgatgaatttatatgtcctaataacaaaagaataggtttttaaaagatatgcataccgtaatgatagatatggttttaaacgtgacttcaagctatatgaatgcgatgactgttcagcatgttctttgaggcaacaatgcatgaagccaaattcgaaatccaataagaaaatcatgaagaattataattgggaatactttaaagcccaaattaatcaaaagctttctgaaccagaaacgaaaaaaatctatagtcaaagaaaaattgatgtagagcctgtttttggatttatgaaggctattttgggtttcactcgaatgtcagttcgaggaataaataaagttaaacgagagctaggttttgtattaatggcacttaatataaggaaaatagctagctcgacgagctgtatattatcaaatacaattttaaaaaaagctgatttctatcaaataattaatagaaatacagcttttttacattgcctaagaacttaatgtcccagcctctttttgctttagaatagcaatacgaagattcgaggcatgctttattatagtgtatacatttttaacggcaagcagttatcattgaggttatattttagtcagttttttattactaaatattttataaaaatggtataatattttgtgggcaagttgaattgatggtggctatctgagtaaagggggggtggtgcctatggcattacttaacacttttgaaaggaaaagcctattgtgatatctattgcaaacgcattacatttaatgttaagtttcggtatgtttatcgtcactttcattggtatagtagtcgcaataataaatttaagcaataaaaaataaccatcatttcaaaactttgacatagaatgatggttaaagaaaatctcatttagtcaccgtctttttaacgggctcattaggcgacatgttcctccatgtcgtctttttatatttttatagtaacatatcttttatttaattgtctatttttattagatgtgtaacaaaattttgaagtattttccttatattgcttgctaaacatgtcagatttgaaaggaaaatcatactatagtagaaatcacttatgattctatggcagtacttatacataagtgatttctattgaatatgtaatgaagttcatatattaatataactttcattggtatagtattcgcaatgattaatttaaacaatataaaacaaccatcatttcaaaactttgacaaagaataatggttaaagcaaatctcatttagtcaccgtctttttaacgggttcaataggcgacatgttcctgcatatcgtctatttatgcactgcgcaatttaataataatacaattatactttgatgtccatttaacataaagtagttgaaatttgcagcaaataaattaatcttgactattttcagaaaattctgtataaataacaaaaaagagatatggattaaatatgaagaggtgtttttagagaagaacaaaatttatggcgctatattatatttatctttagcacttggattatcaacagcagcttttgcatctacagaatacgcagaaggaggcacttggagtcacggtgtcggcagtaagtatgtttggtcttattattatcatggtcataaaggacatggtgcaacagctattggaaagtacagatcatttagtggttatacaagagctggtgtaaaagcatcaactactaaacataattggtgggtcaatagagcatattataacatttattaaatactaaataatcatacaaaataaacaacgcaagaggtacaacatgaaatggttcaaattaatacttgatgttacaatcttcattctgattgctatattgttatttgtttatacatataaagaaaaccaagaaatattgactgatactaaataccctatagcggtaactgactggaataaaaaatatagtaaaaatgagatttataaacgtatagatcatttcgctaaaaaagagaacgtagcaatctataaatcaacttcaaattatacaaacaaaaatgtagataaagatatatatgtatttaataaatcaaaagcaacaactatcactccttttaatgctaaatataacattcattatttaagtgatgacgaattattaaaaaaagatatcaaagggagttattttgtaaaagacaaaaattttgacgtgtctaaattcataaattttttaaaagaatatggtgttactgctgaatcattcaaaatagatcatatgatgattgccgttggtgtcattaaacaaatgaatatagtagttccgttatcctcacttttaatcgtttattttatttattatattttcgaaaagaacattaatttcaaagcgtatgcgattaagtatttaaatggttttacattaagaaaaataatttttgaaaatttttcaaagaaatgcacgtattgggtaacgttaatcataactcaaattcttttaactacaagtgtactttggatattaaattacacgggtaatttagatttattcatattaagattagttctgctttcatgtctttttattttaacgattagtgttattaatttatggactttcttaatgttactaaatttaaatattgccaatatgattaaaggtaagcagcactttaaaacgattcgttttattaatacagtttgtaaaagtattctcttagtactaatagctagtgtaatgatagaaaatactagtgttattaaagatttgaataaaataaaggaaactgagaagtattggaatgtattagatgattattacacgattgaatttgcaccttatcatgaaacgaaacaaagtttgattgataatatgctgcgatcagaacaattagtaaaggctagtgaagcagaaaataatgcgattttattcaaaccaaagggtgactccgttgacaatgacaacttttcgcctgatgaggggaatgtaatattagtaaataatcagttctggtcgatttatcacaagcagtttcaacctgatattccgataaaaaatcaaaaaaataatgtcgaagtaattattccacaaaagtttcatgcaatgcgtaatgaaatcaatcaagcatatcattcatggtttgaatttgtacaaaataaaaataataaagagaataagttatctatacagtttatcaacaaaaatgattatcgaattttttcatttgatgcacgagatagtcgccatttgtcatttatagaggcgccaatcattgtgaatgttcaggcatcagatttatcgaatgatttttattatgccatgatcagtcaaggcgggtatttattcaaaaattatgacgcgctagtaaaaaatattgaaaagtatcatcttgatggggaaatcagtggaataaccaattataaagatagcgtgatggaaatgtatcatgaaaacaatttgaaattaacagtactcaacttttcacaaatcattatcgcaatcattttaataattattattttatttgatgtgaaatattattttgaacaacatcgaaaattactcgtaatcaaaaagctatatggttattcaacattaagagccaattaccgatacttattaataaataatatagttgttgtttttattggaatattgacgaatgtaattttacattctcactatataatgatgatatttgcaacgatccttgtcgttcaaatattattgcagatttgcagcctatactatcatggccgacgttttaatgaagttatcaaggagttttaactatgaaatttatcattgcaatattattaggattaatcgtatccattactattgcttttacaatcatacatcatcctatactagatcgttttaatcctttcttaaaaacggagtatagttatgccaaagtgccaaaaggtacgcaacaatatgttaatattacggcttatagtgaaagaggggaaaagcttgattataaattaacatttaatggattttcacctagtagaacgtatgtcgaaataaagcataaagggcaatatgttatatcgatcacatatgttgaaaaagaggatacaccaaaagaggtaagacaagaatgatagaattaaaagatttaaccatacaaaaaggtaatacacatattttgaagaaacttaatttgaaatttcaatgtggaaaatcatatgcacttattggtaaaagtggatgcggtaaatctacactattaaatactattgctggacttgaaaaaacagggaaacaatatgtctattttaatggtcaattagaacaatttaaatctaatttttacagagataaattagggtatttatttcaaaattatggattaatcgataatctgacagtaaatgaaaatttagatattggattagcatataaaaaaataagtaagaaagaaaaagaacaattaaagatacgttatatagaacagtttggtctgtcaaacagtttaaaaagaaaagttcatacgctaagtggaggtgaacaacaacgtgtcgctttaattagaatgatgttaaaagatccgattgttatgttagctgatgaaccaacgggtgcgttagatcctaaaacaggacagatgattattcaatcattatttgatttggtcaatgaaaataaagtgctaattttagcaactcatgatatggctattgcaaatcaatgtgacgaaataatagatttagaacagtatagaaaagtagcatctatgtgatatccaaaagataaaattaaaagccaatcaattgggaatgttaatttcaacactccgtttgattggcttttataatgcgttgctatgttatgaaagtaataacggcaaactgaaaaaaagcaatataataatatttaatacgattagtaataaatgtaattgatttttcgttttaatatagcaaaaaacaatgactaaagataacaacaatatcatgattgcacctgggaagaaccataatgctgaagctgtgtaccaaatcattggtaacgccataataataaaagatataagacaagaaaggataccaataatattataagttctagtcaaaattacacctccaatattcattttaaaatgacatgcgtaaaacaatcattttaaatacatcatacaataaaattaaattgtatgatagaagaatttgaaattaaattgaattggcttgattaaaaagtgattttatagaagataataaaaatggttatttaatagaaaaccataatattaacgacatggctgataaaatacttcagcttgttaataatgatgtattagcagaggagtttggttcgaaagcgagagaaaacattatagaaaaatattcaacggaatcaatattagaaaaatggttaaatcttttcaatagataaatgaaaaaatcctaggtattcatgagtacctaggatttttacgcatgatatatacaaaaaaagagaggatagtcctctcaaataatagttaataaaattgtagccatttcttccagctgtaactactaatacaagctaagttcattacgatatgtatgatttcaaattcataaccacttacatatcctcttgtaagtttaagtgtgaagattgagcctaacataacacaaatataaaaaacattaacataaggcgttaaaaagccgataataagtgctaaacctccaacaacttcaccaattgacatcaatactgcgatggtaggtggtaaacctaaagagcctaagaagtgaattgttccatctaaatcaacaaatttcaaagtaccgtgcactaagaatgatgttgctaacatccatctaattaaaagcatacctaatttcatcatgtcacctccaacattcgtatttttaaaacatagtccaaattatatttgtaaacatgtggaaagtaaagattttttataagattaattattaaatattctattgtattgaacaattgttgtagaaagatgtttaagtcatcagttactttttgcatttataaataaagattagtacagcatagtacaaagattatagggaaatgaattaactattgcatcgctatttatgaatcgtaaacactattatgaaattgcaagagtagtatggacaattagatgatggtttgagataaatgcgtgttattaaccagtgcgtcatcttcaaaattagaggccaattgctgtttataataagaagatttgataatcaactatgataagaaaaaataataacctcctaaatatatcataaacaaattaaatgataaaataataatatagttttctactaaaattgtttggaggtaaatgtgtgaataggaatatcgttaaactagttgtgtttatgctaatcttcgttgtagcagtagcgggttgtggtcaaaaagatactgaagagaaaactgaaatgacgacaataaaagatgaattaggaactgaaaaaattaagaaaaatcctaaacgtgttgttgtattagaatatagttttgctgattatttagcagcattagatatgaaacctgttggtattgcagatgatggcagcagtaaaaatataacaaagtcagtaagagataagattggggcatatgaatcggttggatctaggccgcaaccgaatatggaagtgataagtaaattaaaaccggatttgatcattgcagatgttagcagacataagaaaatcaaatcagaattgagcaaaattgctccgacaatcatgttagttagtggtacgggagattataatgcaaatattgaagcatttaaaacagtcgctaaagcagtaggcaaagagaaagaaggcgagaaacgtctggaaaagcatgataaaatattagcggagattagaaagaaaattgaacagagtacgttaaaatctgcatttgcattcggtatctcaagagcaggtatgtttattaataatgaagatacatttatgggacaattcttaattaaaatgggtattcaacctgaagtcacaaaagacaaaactacgcatgttggtgaacgcaagggtggtccttatatttatttaaataatgaagaacttgccaatatcaatccaaaagttatgattttagccactgacggaaaaacggacaaaaatagaacgaaattcattgatcctgcagtttggaaatcattaaaagctgtgaaagataacaaagtttatgacgttgaccgaaataagtggttgaaatcaaggggtattatcgcaagtgaaagtatggcagaagatttagaaaaaattgcagaaaaagcaaaataaaaatacagcgccactcgtaaatcatataagagtggcgctgtatttttaattatgtttattatctgtcggatgtgatgatttacctgaaagtttatttcgaataaatttaattacataaccgacaaggattgttttaacaattcttttaatgaattggcgcatcgttacatacctcatttctctatatcttacgaactatatacccattcatatatgcttttcaaacgtcattgtcacaatttaatttttagggaatataatataaccatctttatctgcttttttagtaaaaatgacaaaaatggcatgtattattgagatgatggtagggatacctgtccagaaaaataataagtgaaaaagaccttgtccaaatttatcagcataaaatttatgaatacctaaacctccaagaaataatgcaacaataacataaatggctttattgactttcatttgtaaatcctccttaactataattctacttaaattcgttgtgaaaaccaatatttctaactttagaattttcaaactttctaaaattataagtatatctttttaaaataaggtagaatttctatataataaatgttaataacgtaaaagggaatgatgacatagtgatacgtcaagcacgtccagaggaccgatttgatattgcgaagttagtttatatggtttgggatgatatggaattagaattggtaaagcatctacctaaagacatagtattagatgcaattgaaaaaagctgtgttgatgcaacatatcgaactttttatcagcatattttagtttatgaagttgaaaataaagtagcaggttgtattattagctatagcggtgaaaatgaattgaaatatgaaaaagcatgggaactacttgacttgccagaagaaataaaacaatatggcacgccattacctgtaaaagaagctaaagacgatgagtattatatagaaacaattgcgacatttgaagcatatagaggtagaggcatcgcgacaaagttattaacgtcattacttgaatcaaatacacatgttaaatggagtttgaattgcgatattaataatgaagcagcattaaagttatataaaaaagtaggctttatatctgatggacagattgaattatacaagcacatgtatcatcatttaattgttaaataaaaaactcgacagttcgatgtaagtcgattgccgagtagtatcattttctattaaatgcctgcaaataatgcactaatataaatacctaatgcatataataaaccgaaaaatgtatttgttttaccagcagcaaccattgctggcatcattgtaggcggtgtatcattcttcttgaaacgtctgataactttaacaggcattgggaatgataacaacgcaagtaagtaaaataatgagccaccaggtttaataatgatcgtaagtacaataaaggcataagcgataaagtacatgattgccataaatgttaaagaagcatttttacctaatagaatgggtaaagttttacgaccacttgctttatctttgacacggtcgcgaatattgttagccatattaattaaaccgatagtgattactataggtacacttagccaaattacatagctttgaatattgccagtttgaataaagaatgcaataacgataataaacatacccataaatacgcctgagaataattcaccgaaaggcgtccatgaaatagggaaagggccacctgtatataggtaaccaacagccatacatactaatccaactggtaataaccaaaatgaagagttagcagctaaaaacaaacctaatattgctgctaagatgtaaaatgcaatggctaatcgtagcacaagctctgggctcataccgttgcgtacaattgcaccaccaatgcctacagattcatgatcatcaaggccttttttataatcatagtattcgttaaacatattagttgctgcttgaataagtaagcatgctagtaacatggcaatgaataggctgattttaatatgatcttcgctaccaagaaaatatattttagatgctgctgtaccaactaaaacgggtactacggaagcagttaatgtatgaggacgcattaaatgccaatatttcttaactgtagaatattgctgatattgattactcattgaatacaaaacctctttaaatcatattttttataacaaagatattttaatagaaagtagcataaaggtcaattgacgtgaaaaattgcaagataagtttaagcaattcttgtaacacaattatccaaaaatgatacaatataataatgagtgaaaaaagacgaagaaagaagtgaaatggatggctacgggcgtattagaggacgatattgtcaaagagatatatgacagctcaaaggaatgggtttcagttgaagtgaaattatcacagtcactagacccgagcacattatttcatctcactgacaatgaggcaggagatcgcttttatatgcgtttgaatgataatcgaacgtcatattttggctacaaagcaattcaattattcaaaaataattctaaaaataaacaatctatttttaaagactgggaaaaattaaaacataacatcacatttatacatccgcaatctgagaaacatcatcttcgagttgttggaggattccaattttcaagtcataaatcagatgatgaatggcgagagttcggactaaatcattttgtattacctgaagttttaatttcaactgataataatgggacatttttaacttatacagttaaaagggaaagttttactgttgaggcattgaacgatttaatggatttgttcaacaatatatcggatatagatgtggacgagcaaattggggaaattactagaaatgaagatatttataaagatgactggcgtcaacttgtagtagaagcaatagaatctattaataatgaagaaaaaattgtactagcacgtagacggttaataaagttcgataaagatatcagtattccatatattctaaagcaagcatattctaaagaaaaaaacagttatatattcttgttagaatcacaagattctatattcttttcacaaacacctgaacaattaataaaggtcaataataaaatactatcgactaaagctgtagcaggtacaattaaacgttcacaagatgaggacgaagatacaaaaaatgttgaagcatttttaaaagataataaaaacttaatcgaacatcgatttgttgttgacagtattttacatgatattaaaccttatatcactgaattacattatgataagacgcctaaaattctaaaaaatgatcatttatatcacttgtacactgaaataaaggcgccactgaaggatgattcgtatattagtttaattgataatttacatccaacacctgctttaggtggctatccaaaagaatttgcgatggattttattgaacagaaagaatttggtacacgaggattatatggtgcgccggttggctatatagatatatatgatgattgtgaatttattgttgcaattcgttcgatgcttattaagaaagcacaagcaactttatttgctgggtgtggcattgttaaagattctgatccagatagtgaattggcagaaacgaatcttaagttcacacctatgatgaatgcattaggagtcgatatgaatgggaaatcataaagcagctttaacgaagcaagtttttacatttgcatcagagttatatgcgtacggcgtaagggaagtagttatcagtccgggatcacgctcaacgccacttgcacttgcatttgaagcacatccaaatattaaaacatggatacaccccgatgagcgaagtgcagcgttttttgcagttgggttaattaaaggcagtgaaagacctgtcgctatattatgtacgtcaggtacagcagcagcgaattatacgcctgcaattgctgaaagccaaattagtagaattccattaatcgttttaacaagtgaccgtccgcatgaattaagaagtgttggcgcaccacaagcgattaatcaagtaaatatgtttaataattatgtaagttatgagttcgatatgcctattgcggatgatagtaaagagacgattgatgcaatttattatcaaatgcaaattgctagtcaatatttatatggaccacataaagggccaattcattttaacttgccatttagagatccgttaacacctgatttgaatgcaacagaattgttaacttctgagatgaagattttaccgcactatcaaaaaagtatagatgcatcggcattaagacacattttaaataagaaaaaaggtttaattattgtaggggatatgcagcaccaagaagttgatcaaatactgacgtattcaacgatatatgatttgcctattttagctgatcctttaagtcatttaagaaaatttgatcatccgaatgttatctgtacatatgatttgttgtttagaagcggtttagacttaaatgtggatttcgtaattcgtgttgggaaaccagtgatttctaaaaagttgaatcaatggttaaagaaaactgatgcatttcaaatattagtgcaaaacaatgataagattgatgtctttccaatagcaccagatatttcatatgaaatatctgcgaatgatttctttaggtcattaatggaagacacgacagttaatcgcgtaagttggttagaaaaatggcaatgcttagagaaaaaagggcgtaaagaaattaaatgttatttagaacaagctacagatgagagtgcattcgttggtgaattgattaagaaaacatctgaaaaagatgcattatttattagtaatagtatgccaatcagagatgtagataacttgttattgaataaaaatatagatgtttatgcgaatcgtggtgcgaatggtattgatggtatcgtttcaactgcactgggtatggctgtgcataaacgaataacattattgataggtgatttgtcattttatcatgatatgaatggactattaatgtcaaaattaaataatattcagatgaatattgtattattgaacaacgatggtggcggtattttttcatatttaccacaaaaagaaagtgcaaccgactattttgaacggttgtttggcacaccgacgggattggatttcgagtatacagctaagttatatcaattcgattttaaacgttttaacagtgtttcagaatttaaaaatgccacattgttatctgaaacttcgacgatttatgaattgataacgaatcgcgaagataactttaaacagcatcaaattttatatcagaaattgagtgaaatgattcatgacacattataattactatgaagcaaacgttgagaccaatcaagttttagtattactgcatggttttcttagcgacagtcgtacttatcataatcacatcgataaatatactaatatctgtcatgtcatcactatagacttaccaggacatggcgaagatcagtcttcaatggatgaaacgtggaattttgattatattacgacgttgttagaccgaattttagataaatataaagataaatcaataacattgtttggatattcaatgggggggcgtgttgcattatattatgcaattaatggtcacatccctatatctaatttgatattagaaagtacgtcaccaggtattaaagaagaagcaaatcaattggaacgccgtcttgttgatgatgcacgtgctaaagtattagacatagcaggtattgaattatttgttaatgattgggaaaagttgccattatttcaatcgcaactagaattaccagttgaaatacaacatcaaataagacaacaacgattgtctcaatcgccacagaaaatggccaaagcattaagagattatggtacaggtcaaatgccaaacttatggccgcgcctgaaagaaattaaagtaccaacattaatattagctggagaatatgatgaaaaatttgtacagattgcgaaaaaaatggcaaatttaattcctaatagtaaatgtaaattaatttctgctacaggtcatacaattcatgtggaagatagtgatgaatttgatacaatgatattaggatatttaaaggaggagcaaaatgactaacagacaatgggaaacacttagagaatatgatgaaatcaaatatgaattttacgaagggattgctaaggtaacaataaatcgccctgaagtacgcaatgcgtttacacctaaaacagttgctgaaatgattgacgcattttcacgtgcacgtgatgatcaaaacgtttcagttatcgtattaactggtgaaggtgatttagcattctgttctggtggtgaccagaagaaacgtggacatggtggttatgtaggtgaagaccaaatccctcgcttaaatgtattagatttacagcgtttaattcgtattattccaaaaccggttatcgcgatggtaaaaggatatgctgtaggtggcggtaatgtactaaatgttgtttgtgacttaacgattgctgctgataatgctatttttggacaaactggtcctaaagtaggttcatttgatgcgggttatggttcaggatatttagcacgtatcgttggacataagaaagcacgtgaaatttggtacttatgtcgtcaatacaatgcacaagaagctttagatatgggtctagtaaatacagtggtacctttagaaaaagttgaagatgaaactgtgcaatggtgtaaagagattatgaaacactcaccaactgctttacgattccttaaagcagctatgaatgctgacacagatggtttagctggtttacaacaaatggctggggatgcaacattgctttattacacaacagatgaagcaaaagaaggccgtgatgcgtttaaagaaaaacgtgatcctgacttcgatcaattccctaaattcccataagttattttgaatatgatattaagtcacttgcgtcgtttgtttgcgatgacgagtggcttttttattttataagaatttaaaaggggcttttaattaattatcataaagataagatagtttgagaaaaattaatagagaaagaataaatgttaaagattattattacaatgaaaaaacgagctggtgagaaattgaattctcgccaacccgctttatgaagtgaaatcatttaaattagttatactaagcgctcataaacgattggtcgcgaagtgccaataccttgtttggatgacgtttgcatgaggatatgctgagtatcatcataatcaagaatataaatgatttcttcattatcaatagatgaaaatttaatacgttgatgtgccgtatctataaaaagaatatgatattgattgtgacttgtatcatcgccatgacgtatacaaattgatttttgtaattgatgattactccaattaccaataaataaattgatattggtttgttctagatgtgtgagtttggttgtgtcgtaaactaaatttataaattgtagttgatacatagttttacctgcctttaatcaatatctatattactttttagtaacctatcattgaaccataccagttataatcacgattgaatgataaatgtaataggcttgaatctgcatcttggattgataattctgtatcccaaggattccagtagataagtttttcttggtcattaattttagcattaccaacaactgctagcgcatgtcctaaatgtgggtcattagggttttgagaaacactttgtgcaagaatcataattcctacattatcttttgtaagttgatcaacttgttcatatgatggtacgccttcttgataatgaatatctctgccttgtgatttaccgtattcaatcatttgattagggaatgttgcacaattaggaaggtcttgctcacttacttcagggtataatgtacgcataatatcatgtgcattataagtgtctgtatttttagttgcatttaataatgctgccatactgaatcctgcacaccatgagttatcgaattgttgttctctaattttgaagttttttaatgtgttttcatattgaacttgatcttcttgtatcgcttcgttttcttcaactttagtaggtgttactgtattttttaactcttgtttcaattttgctgaaactgttttagcactttctttttcttttacattaccaggtagtggcgtagattttactaatctaactttgccatcttcttcaaaataaaatcctttttcatcagtaagaacagtgatatttgaatttttatctttaatttggtctaaatctttagcgatgaagtttgaaattttaacactgtaattcatgtcttcttttgatttgtttaaatcatctttatttttagggctaagtgttaaagtataaacaattttaccgtcttttataactggataatagtaactattatcttcttcaccattaaatttataaattttaaaagcttcgccaagttcatatttaccagtttttgcattactttgtttatctaacgctttagcataaccagcaaattgttgttgtgctagatcttttactttttgaggtactttgtcactcttaacattaatttctagctgtttagagtgtgaatcagctttggctttattgctattagcaaatgcgcctagtgataaaataagcatcgaaaccattatgatgcttataatattgaatactctagatttacatgaactattcatataataccctccatttaagtcaaaatattttgcgttgctaagtctttgcttctatttactaaatccaaattaagatgaagtttatgcagcgtcagggttgtctgaattattgttatcgccattgtctggattgtctggattatcagggttatttggttcgtctgggttgttagggttatctggattattagggttgtcagggttatttggttcatctgggttgttagggttgtcaggattgttagggttatctggattattaggttggtcatcgttggcaaaattgatatcttcaatattttgttttaagaagttgcgtacattttcattaataaataccgcaccattaaattcatttggtacaccgccccaatgaattccgatcacttcatttttctcattaaatactggtgatccagagttgccgccagttgtacttaaatcatattgcattgcttcaccttttaagtacgttatttttcctttactttcccacattgttgcgacaggtttatcacctggatatcctgttacagtaatattttggttaacttgtgtttcagcattattactcattgttgctggtttaactacttcaccaatatgtttgttttgctcattaggggagaatttaactattgctaaatcaccttcgcctgaatatttagtgatttgttcagcagtaaaaccaccatttggataattgtcttggttaattgcagaagggaatgcttttaaagcatgaggatcaccgtgcgtagcatctacgacgtgtttatttgttaaaagagtatctttacctacaactacaccggaagcaataaatgtaccagtaggtgcttcaacttgaatataagttacgggtgcataatgaccattcgttgtatctaaaatttggtgtcggtcattatttggtaatatgacatttgcgtgttcacgttgttctaatggtttaaggttaccgcctttttgaatcttaggtgtttgctgtttgcttgactgcgtttgttgtggatgattgtccatagcctttgaagataacgcgtttgctgcaggagaactcacaagtgtcgctgttgtcaaagttgcaacgaataaagaactaacttttaaaaatttacctttcatctaaaaacctccaaaaaatttatttacaagttaaatataacactaaaaatttttaagtcaataagaatatataaataaattaaaaagtttttgtaaagattagagtttacaaaaacattaagggaattaaaattgaattgcattatactttattcgattgagttaaattgataaggtcgtcaattgtttgcatttatctaaaagaataaataagaaaggaattgagagcgaagggaaagtatttgtttataataataaatagtaacttttgaataataattgtttggccaaaggtagattaatatgaatggtgatatattatttgagtgcttaagtttcgaagaacaattataagttagcatattaaaagcttttgatagaatcattttgagtgaggtgtttaaaggagaggaatataactcggtagtatttacagtctcttcagagtattatttaaaacttatagaatataaaaaactgaacgtactatgaatttagttcacgacgtccagttcaacatatcatttttatttagtatttaaatatttagcaagtctcttcataccttcttttaaaacatccatttcataagcataggaaatcctcacaaatcctttaccgaattctgtaaaggatgagcctggaacgattgctaaatgtgttgattcaagtaaatcgacacaaaattcgaaatcgtcatcggtgatatgtttaatacttgggaaaatataaaacgcgccttcaggttgagcggtaatctcaaaacctaatttagttaattcagatactaaataatttcttcgttctacataagcttcgttcatatatttaggagcttctaatccttcgttaagtgctgttatacatgctatttgagctggaacattggcacaaatacaattataggcgtgcataaatgttaatttatcaatcaaatattgaggtcctaatagaaaaccaattcttattccggttgctgagtgtgatttacttaaaccaccaattaatattaattgatcacgaatgtcttcaaattcagcgaaggatacatgtttaccactaaatgtattttcagcataaatctcatcgctaattataaatatcggatatttttttaatacatttacgatatttaaaacttcatttctttttaaaactacgccagttggattagtcggataatttaacaagacagcttttgtctttggagaaatatgactttctaacgcatcaggtgtaattttgaattgtgttgctgttgtatcaatataaattggtttaccacctagtacttcgatgagtggtatgtagcctgcataaattggtcccggtattataatttcatctccaggctctatgatagaacgtaacgttgtgtctattgcttcacttgctccatttgtcacaataatttcttcaggatcataggaaaaatgataacgatttttgaagtattgactaattgcttcgcgagtttctaataaccctttattgtgagagtacgatgtcttgtcattgttaatagcatcaacatatgcctttttcacaacatcaggcatcgggaagtctggttggccaatagttaaattaacacaatcatccaaattattcatgcgatttgaaaattggcgaatacttggtgctcttaaatatttagaattagaatttaaagaaagtttcatttatgacacctcaaatataaatcaaatattgtctaaaaatttagaaattaataatatcataacatacttttaaagcaaaaaagggtaaattacttaagctttatttgaaaaacgaaaaatgtctaaatacactgtagtaactacttttcaaaatgaatgaagtggttacagttaatgtacttagacattatataattatgagtctttaaactgtgatggtctttgtaaattaattattggatttgtccatttacaaacaaagtttgtagataatacatatacgatgattacagatatacttattaaataaagatacgtcattaatgaaataggattatcgaatgggtaccattcaaatcctctaacaatgccaataattaaaccatgtaataaatatacgtatagcgtacgactaccaatataagtatataattttttctttgttgacactaaatttagaaacgcagtcattgcgattaatataattccatataatataagtcgtttaaaaggactgaatacactctgtccttcattttcaagtgaagtatatggtgaacttcctaataaccaatctgcattgataggatgaatcacgtaaatgataaaaaacaaaataaaggtaataatagatactggtattagttttttatttttaaaaatagccgtatgttttttggtgaaaatgtaacctaggtaaaatattgggaaaaatacgattgtccttgaaatgcttaagtagctatcgatgttatctgaaaaacctgctccaatagatataataattgaaactgatagcactttatatggattaaatcttctaactattactaaaatgacatgaaagaaaaatagcgtgatcaaaaaccataacgcaaatactgggttaaaaggatcaagttgtaattcgtcacttttacctgttaagaaataatatattgaaaagaatgcaaaaaatatcatataaggtactatcaaacgttttgaaattttttctaaatagtatggtttatcaatatttttcgcgaaataaccagatataaacaaaaatgttggcatatgaaaactataaataactaagtataatgctgataaatacttatcgccactagtgtagggttgtaacatatgtccaaatacgactaataatattaaaattgctcttgcgttgtcaaaaaaataatctctctcttttaatgaagtcatattttatctcctttatgtccataagactcttactaatttattatattttgtattagttatgcaacaaatttgtctattgtgtcgaatagtattgtaaaaattataaaaaaagcatataatattataaataatatgtagtggagtagaacaacatgtataaacaacttgaaaaacttattacactgactaacaatgacttaaacttagtgaatagaagatttggacaacgcacggatatcacatctgaacagctagaacttctccgtattttatttaattacgatcgcttatcacagtatgatttgacgatgaagattagcagggaacaatctatagtttcaaggtggattaagaaattagttttgaaagggtacatcacaagtcaacaatctagtgaagatttaagatgtaaagaattaattttgactgatcaagcacgtacattaatttcacaaataaataatgcacgttgtgaattgattgaagcaagatgtcaatgtttatcggaagtcgaattagacaatttaaatcaattacttgataagttaaatcaacgacgcatatcgttgtaacacggcaatagcaaacacataatttagtgtcattgtgcacacaacaaaaattgaatcatgaattacaagcaaaagtagcggtgattgttaaaattgatggtaaacaatcaccgctatttttgcttgtgtatgtataaaaaagggatcaaaggtcatcccccatgattgatagtggggggatgacttttgatcctatgttcatgttgcttatttatattgtgggatgtcgaagtatttgccgacttcgccaattttatcatagtagcctttgatgattttagcattgatgttagcccaatctacatctgttgcatattggtgtgttcctggatgtgcaggattccatctcattttgtaaagcgtattttgaccagcttttacatatgagttgccgatgaatttagcaccaccaacgattgcttttgatactgtgtcccaaccagcttgtttagcatatttaataccttcacgtaaaggatcgttatcatatgcagcaataccaaatacgttatggtatttcgtgttagagttagttacaactttgttgttcacaacatctgcaccttttgctaattgagaagtaccgttacctgtttctaatagggcatgtgagataagataaacttcattaatgccatacatttgagcagctttgttaaatgcagcaccttggttttctaatacacctttaccttttaagaattgattaattttatcaatagaaatattttgtggttggtctaagcgtaagaattgatattttaatgctggatcttgagctaaacgcttcgtatccattgcatgcttaacatcattaaagttagcatcagtccacttacctggtacacgttgtacttgtggtttatattgtaaaccagcttgtatttgagcaacttggtttaatgtcatacctgtttgattatacttaattaattctttagctaaatcagttgatttaatccatgctaatttaccgttagataatttaccatagtaccaagtttgtccattaatgacttgttctttaacaactgcgaatggttgttcattaaatgcttttaatgagtatttagctgtatcagaatttggtgttacatagtaataaccattaccatttttaattacataagtgtagttataatctttggcagctgatgtagttggtttaacagcagttggtgcagttaaatcttttgcatttacccaaccagtgcggttattaatagtaccgtataaataaacatctttgcctacagatacttgtttcgttgcattaaatgtaccttgagcaatgttattgcctgttaaaatgacttggtttttagtaccccaaggaaccattgataagccgttatttgatttattaacagtatatttttgagtcgttttaacttctttgcctaagttttgaacatttaagtcttttacattgaaccaacctaatgggatgttatggcttgtattgtttaataatacatacgtttcattaccatgagcacgctcttttgttacatagaacgtgcggtctgcatatttcgcaccgtttttcgctgttttttcataaacagaagcacgaataccagtgttgtttggtttaacttgagcaattttgctaactgtttgagtcgtttgtggtttagtaacagcataagcttttacagctgtttttggttgtgctacagcttttttaggtgcaacaggttcagctaaatatgctttacttacccaaccggatttaccatttacagttccatataaatagatagatttatcaatttgttgttgcttagtcgctttaaaagtttggttacctgtaccagataccgcaccagcttcttgtttataagtaccccaaggtactgaatataatttagtgccgggttttactgtatatgtttgcattacatttacaggtgattttgcattgttataaataacgtcaccttgtttaacccaaccaattaaagttggactattgtaatctttaactaagtagaatttgtttccacctagacttgcttcttttgttacagcaaatgttttttgaacttctttcgttggcttaccagttttgtcataaactgtagtgaataagccattgtttttagcattaatttgagcaacaccgtttaatgatgaaactgttaatttattatttgttgtaggtgttgatggcttaggtgttggtgtaggtttagcagtatcaactaaatatgctttacttacccaaccagatttaccattcacagagccatataaataaattgatttatcaatttgttgttgctttgaagccttaaatgtttggttaccagagccagacacgctaccagcaacttgtttagatgtaccccaaggtactgtataaagtttcgtaccaggtttgattgaatatgattgatttacatttacaggtgatttagatgtgttgtaaaccacatcgccttctttaacccaaccaaatttattaccagaattgtaatcttgaacaagatagaatttttgattacctaatgtagctgttttagatacagcaaatgttttttgaacttcattagttgctttaccagttttgtcgtaaacagtagtatataagccactatttgtcggtttaatttgagcaacaccattgtttgcagcaacagttaatttaccagttgatggtgtcgacggtgttgatggttttgatggtgtagtaggggtagttgtagattgtgtgccccaaggcgcaactttccccattttaattaaatatttttcattaattaagtcatatagttgatcataactataattatgacttcttaaatatccatgtggatcggcatggtccgtaccacctaaatatttacttacagcgtagtgagtccatactgtaccatttccatcatattcagcactatcaggtttcaaaccataatattgcaattgtgtagctgcatagtcagcatagttattcattgaacgtgcaaatgaagcataatcgtgtgtatgaacgatttcaacattgatgaatctaggattaccgactgcaccgacaccccaagataagtaatccgttggtgctgtttcgattatacgatccccatcaacaaatgcatgtacgaatgcgttttgatagttgtttttcatataactaatttcaccatttatcgtcgaacgatcattagctgtatcatgaactacgataccttcaggacgcccaacaccgttacggtatgcgtatttagggaagtaagatgtataatcttcttcaatcttaggtgcttttaagttatttttacgaatgtaatcgttaattgaagagtttacttgtggtttatattttggcaaactcgtttttggtgttgcagcaactgatcttggttgtgctgaaacgctaaaagtagttactttaggtgtcgcttcagttttagctttaggtgctgttgtagttgcagctttaggtgctgcggctttatattgcgtttcaagagctgcaggtttagcagctgatttaattaattctggattaatttgattttctgaattatcatcttcatcatcaactaaactataaccagcatttgtaacattagtgttagttttaggtgctgtagtgcttgttgactttgcaacaggcttcgtattatttgtagtcgctgattgattagcacgagtgtcaccatttacttgtgcagtatcaactttttgacttacttgagcattgcctgttttgttatttgctgtttttggttggacaatagcagggtcttgatatacttgagtgccagaaatgttttgcgttggattttttacctcagcttttgcttgttcagtagttgctttaactttattactatctaaaacgtttttattagtagtttgatcttgtgtcgtctcagctgcttgaacttgatgtgcagtgactgctgaacctacaagcgttaatgcaaccattgatggtagtttgtaattgaattttttcgccattctatttattactcctaacatttattaattattactaacattatagtacctgttttgtatacctgtgcatatttaaccaatttgtaatatactcttaatttatattttcactgtaaaaaaatgaaaaaaattttgaatctcaatggtgacgtgacaaatcaaatagaattgatgtcaatttaagaattggtttattacaaatgtttctaaaatagatacaactttttttaattaagcgaggttaacttttttgtcatttcaatatgctcgatgccttcctcaagaaatatattacctctcattttaaagtttaaactttcataaaatgggatagcatgacattgggcattcatagtagctacgtaaaaaccttcatctttagctaatgattctacagcttgcataagcattctacccattccttgtccacgatgtgattttatcacagccactcgttctattttgacagttgtttcattaatagggcgtatacgagctgtggcaactggctgtccattatcatatccaatgaggtgaatagattcagattcatattcatcaatttcactttcctctgggacgccttgttcttctacaaacactttctttcttatatagaagcaatcttctaacatctcttgattgtttacttttgaaaacataaaattcctccatatcctaacaaaatcatttacatttaatttactaataataacatagaataacgattgttattttccacaaaaataattagacataaaaaagctataaagatgattcacaagaatcatctttatagctaattaattattattgttatagtgcttcttttctaataattgctgtatattgccaaaagattcgcatttgagcaatattccaattattcattcccattgtaaacccagaaggtttaaagatgttcacatcagttacttctaaagctgctgcgactaaatattgtaatggaatactaagtgatttcattgtttcggtaatgccattttcatcatatacccatgaaaatggtaactctgattcgaaaacatctacactattgaaaatttcaggtagggctaaaatataacatgcaccatctacaataggattctcgatactatttttgtaataaattaggagtgcttcatagttttctcgatgctcatgattgacgtaaaaaaattcacttctaaaatgagccatatcttggctatgaataatttgttgttctaacatattaaacatcccatttatatttgcaatcttttcgtatgtttttctactcatgtatgatgctcctttcataaatagtaaatgttaatcgtcatataatattagtttacaacaccattttggttatttgaagcttgtggcgtttgttgaatattaccttgatcttggttagtgttttgacccgtagtaggttgttgctgattattgacaccattgttgttattactattattactgtcgtcagtattattcgaagatttatctttatctgtcgtatcgttttgttcttttctcaataaactactatctaaaggcgttaatggtattaatgaaccataatggttgataacacgttgatctaagaaatcatttttatcattgataggtgataattctaaatcattacgaagtaagttagcatatttttgaatgctttcaacgcttggatgataatagtaaataccatttaacatatcatctttaccttttagttgtgcagttttaatttcaacatcatttgttaagtacattttagctaaagctttaatttcagagttagttaaattatgcttagcatttttacctacaatttgaatcacattatcaagtttatcaatagaatcaacttcctgtgctttttggaataaaatcttaattaattccatttgacgttgtccgcgtttcaagtctgaatcatgatgtctagttctagcaactgctaaagcctcatcaccatttaatttttggtacccttttttaattttaatcttaccagtatcatctgtgttaggttcatttaagtcgtacggcacatcatagtatatgccaccaagctcatttacagcctcgacaaatgctttcatattgactctcacataataatcaacaggtacattcatggtagcttctaccgaatccattgcggcaattggaccaccatatgcatgtgcgtgggtaatcttatcgtaatagccaactttaggaatgtagctgatagtatcacgtggaatactaagcattctaatttgatgttttgattgattaaaagtagttaaaatcatagcgtctgatctagagtgttcagcatcctgtcctttttttcttcttccatcgttatcatcgatacctaagaaaagaatagagataggttgttcttcgggattgactttattatctcttaagttggattgacgattagcatttttgctgtcttgagaagattcgaatgcatcttgggacgttttaaaaagtaacgtagcgaagactattggaacaacaatgagaaccaatgctagaaggatcaaaaagtattttaaaaatttattcatgattgatgctcctatattaaatttttgttaaatcataatcataattttaaaatataattagttgaacgatatttatacaacttcattactaatacattatagccttaaattgtagtactttatagtaaaaaatacaaatgttatgtcaaagttccttgtaatttgaatgttttgttaaaatcaaaaagcatttttaaaaatataatgcgactttagtatgatgtcttaaaaaatttaaaggcgtaatataaattcgagtgatttatacaaagtgataaggtataattaattttgttgtatagataacatattagaaaaacttattactatgtagcgtaaagcataaatgaatgataaattaatttttgtaagttgtattattaggaagctaggttcaaagttttaactatttaaatatataatgaatacattgtgaggctattatcaaatgaaatttaataaagtaaaactagttatacatgtgtgtgtactattatttatcattatttctatagcgttaatttttcatcgattacagacgaagacacattctatagaaccaatacataaggaaacaaaattatcagacaatgaaaaatatttagtagatcgtaataaggaaaaggttgcgccgtctaaactaaaagaagtatataatagcaaggatcctaaatataagaaaattgacaagtatttacaaagttcattatttaacggttcagtagctatatatgaaaatggcaaattgaaaatgagtaaaggttatggatatcaagattttgaaaaaggtattaaaaacacaccgaatacaatgtttttaataggttcagctcaaaaattttcaacagggttactgttaaaacagttagaagaagaacataaaataaatatcaatgatccagtaagtaaataccttccatggtttaaaacatctaagcctatcccattgaaagatttgatgttgcatcaaagtggattatataaatataaatcctcaaaagattataaaaacttagatcaagcagttaaagcgattcaaaaacgtggtattgatcctaagaaatacaaaaagcatatgtataacgatgggaattatttagtacttgctaaagttattgaagaagttacaggtaaatcttatgctgagaattattatacaaaaataggggatccattaaaacttcagcacacagcattttatgatgaacaaccttttaaaaaatatctagcaaaaggttatgcttataatagtacaggactttcgttcttaagacctaatattttggaccaatactatggtgcaggtaatttatatatgacaccaacagatatgggtaaattaattactcaaatacaacaatataaattattcagtcctaaaataaccaatccattattacatgagtttggtacgaaacagtatccagatgaatatcgatatggtttttatgttaaaccaacattaaatcgtttaaatggtggattcttcggacaagtctttactgtttactataatgataagtatgtagttgtacttgcattaaatgtaaaaggaaacaatgaagttcgaatcaaacatatttataatgatattttaaaacaaaataaaccttacaatacgaagggtgttattgttcaataattaatatagaagatataacatgtatatggcattaaggcatcgaccttatctgaccagtatacgagttatatcttcttttttatagtggtaaaaagtttaaagtataaggttgaagaaggatgagtttaaaaatttgtgttaactcataaaagtggaaaacatttgatgagctggcatcaaactaaaatgaatgaagacgaatacgttggtccatgcgtggtctgaatgttttctaaatctaactggaaatgataatttaataatctacatgtttgattgtttaaacatgtacaatttttaaaaacctagggataattttattgaggtgaacaacattgaaattatctttagacataaatatggattttgaagttactatattaattagttgtggctgttaatgtattaattgaattgataataatgattgtcttataagatatagaaggggacttaaccatttaaaaaattgaaggataataaaaaccagctaacaaaagtgttagctggttaaactttacattattaaaatgttgtttataagtgtgaagagtgaccgccttgcataacccaatatgttccgacaacgaaacaaagtgtaattacaagagcaaagataactttgaatgtttgtaaacgtccatctttaccttcagttaaatgcatgaacattaataattgaagtcctgcttggacgaatgcaaagccaaagataattgtcaacttcgcgtggaatgttaatgacgtgtatagtgttacgtaaactgctaaaagcgttaatacgatagatgcgataaatcctacagtatgtttcattattgtactcatccgctatacaccatccctatcatatatacggcagtaaagatgaaaacccaaacaacatctaagaagtgccagtataaacttactataaataattttggcgcattatatttgtctaatccgcgtcgttggatttggattaataaacaaatggcccaaacgatacctagcgatacgtgacaaccatgcgttcctaataggataaagaaactagaccagtaagagccaattgttgggttaacgccttctgatgcatagtgtgcgaattcataaatttcgaatccaacaaagactaaacctaaaagtaacgtaatgatcatccaaaacatcattaacttttgtttttcttggcgcatgtagtaaatagcaataccacatgtgtaagaactgaataataatgcaaacgtcattattaaaacaagaggcaattcaaataactcagtagtcattttacctgcataatcgccaccatgttgcaaagttaatagtgtcgcaaatagggtaccgaataacgcaaattcggctgtaatgaaaatccaaaagccaagcttatttaattcgccttcatgtgtgcgtgaatcaatagtgtttgtatcatgactcatgacttacagcctccctttctttaatacgcgcttctcttaatctagcttcagtttcagcaacttcagcagcagggatatgatatccgtgatcgatttggaaactgcgataaatcatagtaccaaaaataccgaataaacaaattaatgctggaattacagtttcgaaaattaagaagaaaccgccgatagtcataaagataccaatccagaatccaacaggagtattgtttggcatatgaatgtctttgtaattatggttgtctaagtaatgacgaccatgttctttcatatcaacaaatgtgtcgtagtcattccaatctggtgtaatggcaaagttgtatttaggtggaattgctgatgcagtagtccactctagagtacgaccaaggccatcccagttatctcctgttgcttcacgtggagatttgaagtgactgtatacgatactaacaacaaggaataagaatccgattgccattaataatgcaccgatagttgaaattaagtttaataagaaccaaccatctgatggcatataagtgtataaacgacgtggcataccatctaatccaagaatgaattgtggtaagaaacaaacgttaaatccgatcatgaagaaccagaagcaccatttgtttaatgtttcgtttaatttgtaacccatcatctttggataccagaagattaaaccagctaagcaggcaaatacaacaccagtaaccaatgtatagtggaagtgagctactaagaagtacgtattgtgatattgatagtcagcagatgccattgctaacattacacccgtaacaccacctaaaaggaagttagggataaatgctaatgagaatagcattggtgactcaaatgtaatacgtcctttatataatgttaataaccagttaaacaatttcacaccagttggaataccaatcagcattgttgaaattgagaagaatgagttgattaacgcaccattacccattgtgaagaaatggtgaacccaaactaagaaactaaggaacgcgataccggcagttgcccataccatactttgatgtccgaataaacgcttacgagcgaatgtcgggataatttctgagtaaataccaaatgctggaaggataacgatataaacttcagggtgcccccatacccagaagaagttagcccaaagcattggcataccgccatgtgcaactgtgaagaatgctgtgtcaaatattctatcagttgtcattaatgctaacgctactgttaaaggagggaaagcaagaataacaattaatgtagtaataaatgttgttactgtaaacattggcatttgcataaacttcatagttggtgttttacatcttaaaattgtaacaaagaagttgatacctgtagctaaggtaccaagccctgaaatttgtatagctattaagtaatagttaacacccggaccaggactgaattcacctgctagtggcgcatagtttgtccaaccagctgctggtgaaccaccaataataaatgacaggttgaataaaatcatacctgcaaagaatagccagaaacttacgttgtttaatactgggaatgcaacatcacgtgctccaatttgtaatggaacaacgatattccataaaccaaagataaatggcattgccatgaagataatcatgattacaccatgtgtactaaaaatttcgttatagtggttagattctaaaaatttgttatcaggtactgttaattgcgcacgaataagtaacgcatcaataccaccacggacgaacattaatacggcacagattaaatacataataccgattttcttatggtctacagatgtgaaccattctttgtaaagatatttccataatttaaagtaagtaattactgcgattaaaccaataactaagaatggggcaccaatttgtgccattgtaatcatccagttacctttaactagtaattgatcccatggaaaattcattaatgtccacctccatgatcatcattgtcttgatcttgcgcatcttttgaaattttcttcatttctttcgcatttttcgattcatctttcttgaactcattgttatatggttcgtcatttccaagaatcatcaatttcataccatgtcgtttatagttcgcatttgtaatttgagctttacgagcaggtattaatggtttgtctgatacatctttaaacatattttcttcactagtgaagtttggatctttcaattcgaaattgaaacgtttatatgcatagaagatgtattctggatcggctgctggatcaacaaacgccatatgtgtaccattaaattctaaagctttattaggtgtgcttggtaataattgtttatcaaatgtatcttgatctaacgttttcttacctttaacttctttcacccatttgtcgtagtctttttgactaacggcatttactttaaatgtttgacgtgagaatccttcaccattgaagttagagttacgacctctgaacgtaccagtttgagatgcttctaacgtccaattcattgtcatgccagtcatggcatatttttgaccacctaattgtggaatccagaaacttgtcattgtatccatagcttgaagcttaaatacaacaggacgatctttagggattgttaatgtattaacagtctctatatgttcatctggataagcaaagaaccatttgtatcctgcacttactgcatatactaccattggatctttctcactcttcggtggtttttcgtaatcgtataaagttttaactgtaggaatagctaaagcagcaacgattatgataggtattacaaaccatattgtttcaatgatggcattatggtgcatcttaccagattcggcattcttattataactatacttgtaaataaaaatggcgaacatgccaagtacaacgaaacaaataacaagcatgaagacgattgaataaagaatcaagaacttctgactacttgctactggcccttttgcgttgaaaatttctatatttgaacaaccactaagtaaaattagtgtgccaaataatagaagcaaagacttaaattttgacacttttttgacctcctaatactacaaatgtagggcttaacattaattttaagttattacacaatatttacaagggcttatgggaaaaaaattaataaaattgtatcaaaaatgttgataaatcaaggtgtgacgtgggttcacacatttgttaaaattatgtgtacattttgtgactaatagcgtttttgaaaaaattgcttcatatttaaaagggaagttgagaatagctttcaattaaaggttatttgaatgaaaataaaaaaagtttgaaattgtctaataaattgaaaatgatggctagttcattgaaaggaagcgcaaacattttaataaggaatttgccaaaagtaatttatcgttaaacaatgaaaagcggaaatttgtttgttcaaaatctaaacattctttttaaaaagagcagttaagttttaataatttgataggtagtcctttggtatacagaaaaaatacaatatttgggttaaagttgcagatgaagttggaataacaaataaaatggtagcaaaacatgttcgtttgctaccattttatttgcagtatagtgatgagggctatttaacctcaatatacctagtggaaattttaattgcaccatctgaatcagtgacatgatatttaatttgatatttaccagatttagatgtatcaatttggccatcgactttaattttatcggttaaatctccatcttctttatcaaatgcacttatgccgtttagaaggttataatcttgacctttcttaataacgatatcattagcgcctttaatttgtggtgtagtattcgtcgttgcatctgcatttaaatttggtgttactagtgtagcagaaacaccgagggctgataatgactgtaatagtttattcataatgtaacctccgaatgataagtcatttctgagttagctttactataccttaatttatattatttacacatcatactatagtcctaatcttaccctataaagaatgaaatttaaatataaatttataaataatgaggaaataattattattttgaaaatctgccacaattgtaaaattaataattcagggataatttgaaatcaaatataactttattcgacagtttgaacttaaatttttgtgtatcaaaacaataagaaaagggaggcgaaaatgataaagaaccactaatgattaattatgtagtagtactttatcatagtcacagcttctgtgttggggcctcgccgacttgcacattattgtaagctgacttttcgtcagcttctttgttggggccactaccccaactcgcattgcctgtagaatttcttttcgaaattctctgtgttggggccccgactagaattgaaaacttgttacaagcttattttcattcaattaattactgtctatataaaattgttgagcctagaacaatgtgaaatgctcccttcaaagccttcattttttcaatgtctactttgaagggagcatttgattgattaatgtcccagattcttcttattattcattgcaattgcgaaataatatttaatgaggattaaaagagttcattaaaactcagatattaattctcagtacataactaatgtgaatttacgaatcaacacctcgacgcattttttctgcaagcaaggtattatttaataccattgtaattgttaatggaccaacgccaccaggaacaggtgtaatagctccagcaatttctttaaccgcatcataatcaacgtcaccttttaatttgccattttcatctggcgtattgccaacatcgataattactgctccttctttgacaacatcttttgttactaaaccaggcttaccaactgcactgactatgacatcagcatcttttaaatatgatgccatatcctttgaacgagaatgtaagattgttactgatgcatttttttgaagtagtaacttagaaactggttgtccgacaatatgacttcgtccaattactactgcatttttaccttctaaatcaatatcagcatgttttaatatttccatgatgccaagcggtgtgcaaggtacaaaagtttgttcatcgatatataatttccctatatttattggatggaaaccgtccacatctttatcaggattgattgcttctaatattttctgttcactaacttgttttggtaatggtacttgtaccaaaataccacttacagaatcatcattatttagtctatttagttcgtttaatacttcttcttcagtagctgtttcttccaagtgtacgatttctgaaatcataccaattttttcagctgctttcttttttgatctaacataactttgactagcgccatcattaccaactaatataacggataatttaggtgtaaaacccttttcttttagcgcttcaacttgattttttaacccctgtctgtagtctttggcaatttgtttaccatctaaaattttagcaaccataaaaacttctcctcctattgtcaatatcctaactttgttagttcataaaactaatttacatagcaaaagacgtaaattcaaacaaaaaatcaaaataaagttcgatttttgattgaaaaagcagaaattgcttgttatgctatatctataatatacaactaaagtaattcacaattcaaacttttgaaagggtgtacaaagtgaaagtagcagtcattatgggcagttcttccgattggaaaattatgcaagagagttgtaacatgttggattattttgaaattccgtacgaaaaacaagtagtatccgcacatcgtacgccaaaaatgatggttcaatttgcttctgaagcgagagaaagaggtatagacattatcattgcaggcgctggcggtgcggcacatttaccaggtatggttgcatcattaacgacgctaccagttattggagtgccgattgaaacaaaaagtttaaagggtatagattctttattatcaattgttcaaatgccaggaggtattccggttgcaacgactgcaattggtgcagcaggtgctaaaaacgcaggtatacttgcagcaagaatgttaagtattcaaaatccttctttagttgaaaaactaaatcagtatgaatcttcgttaattcaaaaagtggaggacatgcaaaatgaacttcaataaattaaagtttggtgcgactattggcattattggtggtggtcagcttggaaagatgatggcacaatcagctcaaaaaatgggttataaagtggctgtattggatcctgctgaagattgtccatgtagatacgttgcacacgaatttatacaagccaagtatgacgatgaaaaggcactcaatcaattaggacaaaaatgtgatgtgattacttatgaatttgaaaacatttcatcccaacaattaaaactattatgtgaaaagtacaatattccgcaaggttaccaagctatacagttattacaagaccgcttaactgaaaaagaaacattaaaaagtgctggtaccaaggttgtcccattcatttcagtaaaagaatctacagatattgacaaagcaattgaaacattaggatatccttttattgtaaaaactagatttggtggctacgatggcaaaggtcaagttttaattaacaacgaaaaagacttacaagaaggttttaaattaattgaaacttgtgaatgcgtagctgaaaaatatttgaatatcaagaaagaagtatcacttactgttacaagaggaaacaacaatcaaatcacttatttcccattacaagaaaatgagcatagaaatcaaatacttttcaaaacaattgttccagcgagaatagataaaacagctgaggcgaaagagcaagttaataaaattatccaatcgattcatttcattggaacatttacagttgaattttttatagatagtaacaaccaattgtatgtgaacgagattgcaccaaggcctcacaattccggacattattcaattgaagcatgtgattattcacaatttgatactcatattttagcagttaccggacaatcattaccaaattcaattgaattattaaagcctgcagtcatgatgaacttactaggtaaagacttagatttattggaaaatgaatttaatgaacatccagagtggcacttacatatttatggtaagtctgagcgtaaagatagcagaaaaatggggcatatgactgtactaacgaatgatgttaaccaaactgaacaagatatgtacgctaaatttgaggggagtaattaaagcatgacattattatatgaaggaaaagcgaagcgcattttctcaacaaatcaagaaaatgaattaagagttgaatataaagatgaagttactgctggaaacggggctaagaaagacacgatggcaggtaaggggcgattaaataatcaaattacttctattatatttaaatatttacaagaaaatggaatagaaagtcactttattaagcaattatctgaaacagaacaattagttaagcctgtgaaaataattccattagaagtagttgttcgtaatattgctagtggatctattacaaagcgtttaggttttgaaaatggtgaagtttttagagaaccacttgtggaatttttctataaaaatgatgcattaaatgatccgttgattacagatgatcacatcaaattactgaatattgcgacagataaagatattgaaacattaaaaacgaaagcgctagaaattaatcaagtattaaaaaatttaatggatgctatgaatttaaaattagtagattttaaaatcgaatttggaaagactgagactggtcaaattttgttagcggatgaaatatctccagatacatgtcgaatttgggataaagctaccagtgcaaactttgataaagatgtatatagaaataacactggatcactgattgaaacatatcaaatatttttaaacaaattggaggatttaaaataatgaaaacaattgaactacatatcacattacaaccacaagtattagatacgcaaggacaaacgcttactcgagctgtacatgatttaggttatgcacaagtgaatgatattcgtgtaggaaaagtattatatatgacagtggatgaggttagtgatgaaaaggtacacaacattattacaactctaagtgaaaaattgtttgcaaatacagtgattgaagaatatagctataaagtgttagatgatgaaaaggagaatgcataaaatgaaatttgcggttcttgtttttccaggttcgaattgtgatagagacatgtttaatgctgctattaaaagtggtgttgaagcggaatatgtagattatagagaaacatcactaagtggatttgatggcgtacttattcctggtggattttcattcggggattacttaagatctggggcaatggctagtgtagcgccgattatttctgaagttaaacgtcttgcagctgaaggtaagccagtattaggtgtttgtaatggatttcaaattttaactgaaataggtttattacctggtgcattattgcataacgattcacatttatttattagtagaaatgaagagttagaaatagtgaataatcaaacagcatttacaaatctttatgaacaaggtgaaaaagttatatatcctgtagctcacggcgaaggtcattattattgtactgatgaaatatatcaacaattaaaagctaacaatcaaattattctgaaatatgtgaataatccgaacggttcatatgatgatattgcaggaattgttaacgaaaaaggcaatgtatgtggcatgatgccacatcctgaaagagctttagaaacgttgttaggtactgatagtggtgtgaaattatttgaagcgatggtaaaaagttggagggaacaacatgtctaaatttatcgaaccaagcgttgaagaaattaaacttgaaaaagtatatcaagatatgggattaagtgatcaagaatatgaaaaagtttgcgatattttaggcagacaacctaactttacagaaacaggtatcttttctgttatgtggagtgaacattgctcttataaacattctaaaccgtttttaaagcaatttcctacgtcaggtgagcatgtgcttatggggccaggtgaaggtgcaggggtagtcgatataggtgataatcaagccgtagtatttaaagtagagtctcacaatcatccatcagcaattgaaccatatcaaggggctgctacaggcgttggcggaatcattcgtgacattgtctctattggggctagacctattaatttgttaaacagtcttagatttggagaattagataataaacaaaaccaaagattacttaaaggggttgtaaagggtatcggaggttatggtaactgcattggtattccaacaactgccggtgaaatcgaatttgatgaacgttatgatggcaatccacttgttaatgcaatgtgtgttggtgttatcaatcacgacatgattcaaaaaggcacagcaaaaggtgtaggtaattcggtcatttatgttggtttgaaaactggtcgagatggtattcatggtgctacttttgcatctgaagaattgacggaagaaagcgaaagtaaacgaccttctgtacaaatcggtgatccatttgtaggtaaaaaattaatggaagcaacacttgaagcaattacatttgatgaattagttggtattcaagatatgggtgctgctggtttaacatcttcatcttctgaaatggcggcaaaaggtggtagtggtttacatttgagattagaacaagtgccaacacgtgagccaggtatttctccttatgaaatgatgctttcagaaactcaagaacgtatgttactagttgttgaaaaaggtactgaacaaaaattcttagatttatttgataagcacgaattggatagtgctgttataggtgaagttacagatacaaatcgttttgttttaacatatgatgacgaagtttatgctgacattccagttgaaccactagctgatgaagcacctgtatatattttagaaggagaagaaaaaaattataatacttctaaaaatgattatacacacatcgatgttaaagatactttctttaaattacttaaacatccgactatagcatctaaacactatttatatgatcaatacgaccaacaagttggtgccaatacgataattaagccaggacttcaagcatcggtagtacgtgtggaaggcacaaataaggcaattgcttcaacaattgatggtgaagcgcgttatgtatataacaatccatatgaaggtggaaagatggtagtagctgaagcttatcgaaatttaattgccgtgggtgcaacaccattagcaatgacagattgtttaaattatggttctcctgaaaagaaagaaatctatcaacagttgatagattcaacgaaaggtatggcagaagcatgcgacattcttaagacaccagtagtttctggtaatgtatctttatataacgaaacgaaaggtacttctattttcccaacaccagttgttggaatggtaggtttaattgaaaatgtaaattatttaaatgattttgaacctcaagttggagataaattatatttaatcggtgatactaaggacgactttggtggtagtcaacttgaaaagttaatttatggcaaagttaatcatgaatttgagtcattagatttgagttcagaagttgaaaaaggtgaatcaatcaagactgctattcgtgaaggggtattatcacatgttcaaacggttggtaaaggtggcttactgattaccttagctaaactaagtgcgcattacggtttaggattaaagtcttcaatagatataacaaatgcacaattgtttagtgagacacaaggccgatatgttgtttctgttaaatcaggtaaaactttaaatattgataatgcaatagaaattggacttttaacagatagtgataatttcaaagtaacaacaccatatacagagattagtgaaaatgtttcagatattaaacaaatatgggaaggggcaattgctcaatgtttaactactcaggattaaacgaagaatgtggcgtgtttggtatttggaatcatcctgaagcagcgcaactaacatatatgggacttcatagtttgcaacatcgtggtcaagaaggtgcaggtatagttgtttctaatcaaaatgaattaaaaggcgagcgaggattaggcttactaactgaagcgattaaagatgaccaaatggaacgattaaaaggatatcaacatgcaattggtcacgtccgttatgctacttcaggtaataaaggtattgaaaatattcaaccgtttctgtatcacttttatgatatgagtgtaggtatttgtcataatggtaacctcattaatgctaaatcattgcgtcagaatttagaaaaacaaggtgctatcttccattcgtcttctgatactgaagtcattatgcatttgatacgtcgaagtaaagctcctacttttgaggaagcgttgaaagaaagtttgcgaaaagttaaaggcggttttacatttgcgattttaactaaagatgcgttatatggcgcagttgatccaaatgctatcagacctcttgttgtaggtaaaatgaaagatggtacatacatccttgcaagtgaaacatgtgcaatagatgtgttaggtgcagagtttgttcaagatattcatgcaggtgaatatgtcgtgattaacgataaaggtattacagttaaatcttatacacatcatacgacaactgcaatttctgcgatggaatatatttattttgcgagaccagattcaacgattgctggcaaaaatgttcatgcagtacgtaaagcatctggtaaaaaattagcccaagaaagccctgtaaatgctgatatggtcatcggtgtacccaattcatcgctatcagctgcgagtggttatgctgaagaaataggtttgccatatgaaatgggactagttaaaaatcaatatgttgcaagaacatttattcaaccaactcaagaattacgtgagcaaggtgtgagagtgaagttatctgcggtaaaagatatagtagatgggaaaaatatcattcttgttgatgattccattgttcgcggtacgacaattagacgcattgtgaaaatgttaaaagattctggtgcaaataaagtgcatgtgcgtatagcatcaccggaatttatgttcccaagtttttatggaatcgatgtttcaactacggcagaattaatttctgcaagcaaatcacctgaagaaattaaagattatattggcgctgattcattagcatatctatctgtagatgggttaattgaatcaattggtttagattatgacgcgccatatagtggcttatgtgtagaaagtttcactggagattatcctgcagggttatatgattatgaagcaaattataaagcacatttaagtcatcgacaaaagcaatatatttctaaaaacaaacacttttttgatagcgagggaaatttaaatgtctaaagcatatgaacaatctggtgtaaatattcatgctggttatgaagctgtagaaagaatgtctagtcatgttaaacgtacgatgcgtaaagaagttatcggtggtttaggtggattcggtgctacatttgatttatcacaattaaatatgacagcaccagttttagtttctggaacagacggagtaggaacgaaattaaaactagctatcgactatggtaaacatgattcgataggtatcgatgcagttgcaatgtgtgttaatgatattttaacgacaggtgcagaaccattatattttttagattacatcgctacaaacaaagttgttcctgaagttattgaacaaattgttaaaggtattagtgatgcatgtgttgaaacgaatactgcacttatcggtggagagactgctgaaatgggtgaaatgtatcacgaaggcgaatatgatgtagccggatttgctgttggagcagttgaaaaggatgactatgtagatggttcagaagtgaaagagggacaagttgttatagggcttgcgtcaagtggcattcattcaaatggatacagtttagtgcgcaaattaattaatgaatcaggcattgatttggcatcaaacttcgataatcgtccatttatagatgtctttttagaaccaactaaattatatgtcaaacctgtacttgctttgaaaaaagaagtttctattaaggcaatgaatcatattactggtggaggtttttatgaaaatattccacgtgcattgccagccggatatgctgctagaattgatactacatcatttccaacgccaaaaatatttgattggttacaacaacaaggcaatatagacacaaatgaaatgtataacatttttaatatgggtattggctatacggttattgttgatgaaaaagatgtatcacgcgctttgaagattttagcagaacaaaatgtggaagcctatcaaattggtcatattgtgaaaaatgagtcaactgcaattgaattgttgggggtataacaatggttaaaattgcgatttttgcatcaggttcaggaagtaactttgaaaatatagttgagcatgttgaatcaggaaaacttgaaaatattgaagttacggcgctatatacggatcatcaaaatgcgttttgtatagatagagcaaaaaagcaccatatccctgtttatattaatgaaccaaaacaatttgattcaaaagcagcgtatgaacaacatttagtaacattattaaatgaagataaggtagagtggattattttagctggctacatgcgcctaattggtccagacttattagcatcatttgaaggtaaaatattgaatatacatccatctctattgccgaaatataaggggattgacgcaataggccaagcatatcatagtggcgatactattactggttcgacagtacattatgttgatagtggtatggatacgggagaaattattgaacagagacaatgtgatattagaccggacgattcaaaagaacaattagaagagaaagtaaaaaaattggaatatgagttatatccaagtgttattgctaaaattgtaaaataaggagtatgtatgtgatgaagaaagctattttgagcgtatcaaataaaacaggtattgtagagtttgctaaagcgttaacgcaattaaattatgaattatattcaacaggtggaactaaacgtatattagatgaagcaaatgtaccagttcgttctgtttcagacttaacacattttccagaaataatggatggccgtgttaaaacattacatccggctgttcatggtggcattttagctgatcgaaataaaccgcagcatttaaatgaattatcagaacaacatatagatttaattgatatggtagtagttaatttatatccattccaacaaactgttgcaaaccctgatgtgacgatggacgaagcaattgaaaatattgatattggtggtccaacaatgttacgtgctgcagctaaaaactataaacatgtaacaacaattgtacatcctgcagattatcaagaagtattgacgcgattaagaaacgattcgttagatgagtcatatagacaatcattaatgatcaaagtttttgagcatactgcagaatatgatgaagcgattgtacgtttctttaaaggggataaagaaactttaagatatggagaaaatccacaacaatcagcgtattttgtgagaacttcgaatgctaagcacacgattgcaggcgctaaacaattacatgggaaacaattaagctataacaatattaaagatgcagatgctacactagctttagttaaaaagtttgatacacctgctgcagttgcggttaaacacatgaatccatgtggtgttggtatcggtgacacgatagaacaagcatttcaacatgcgtatgaagcggatagtcaatcaatatttggtggaattgttgcattaaaccgagctgtaacacctgagttagcagagcaattgcatagtatctttttggaagttattattgcaccaaaatttacgggtgaagcattagatattttaaaacaaaagaagaatgtaagattattagaaattgatatgactatagacagtaacgaagaagagtttgtttcagtatctggcggatatttagttcaagataaagacaattatgtcgtgccaaaagaagaaatgaaagttgttacagaagttgcacctactgatgaacaatgggaagcaatgttattaggatggaaagttgtaccatcagtaaaaagtaatgcaattattttaagtaataataaacaaactgtaggtataggtgctggacaaatgaatcgtgtcggtgctgctaaaattgcgttagagagagctattgaaatcaatgatcatgtagcgttagtatctgatggatttttccctatgggagatacagttgaacttgcagcacaacatggtataaaggcaattatccaaccgggtggttcgattaaagatcaagattcaattgatatggctaataaacatggtattgcaatggtagtcacaggcactcgacattttaaacactaattttaaaggggcgtaacataaatgaatgtattagtaattggtgctggtggacgagaacatgcacttgcatataaacttaatcaatcgagtctagttaaacaagtgtttgtcattccaggtaatgaggcaatgacacctatagctgaagtacacactgaaatttcagaatctgatcatcaagggatactagattttgctaaacagcaaaatgttgattgggtagttataggtccagaacaaccgctaattgatggattagcagacattttacgagcgaatggtttcaaagtgtttggtccaaataagcaagcagctcaaatcgaaggctcaaaattatttgctaaaaagataatggaaaaatataatattccaactgctgattataaagaagttgagcgaaaaaaggatgctttaacatatattgagaactgtgaattgcccgttgttgtcaagaaagatgggttagctgctgggaaaggcgttattattgcagatactattgaagcagccagaagtgctattgagattatgtatggtgatgaagaagaaggtactgttgtatttgaaacgtttttagaaggtgaagagttctcgctaatgacatttgttaatggtgatttaccagttcctttcgactgtattgcacaagatcataaacgcgcatttgatcatgatgaaggaccaaatactggtggtatgggggcttattgtccagtaccacatattagtgacgatgttttaaaacttacaaatgaaacgattgcacaacccattgcaaaggcaatgcttaatgaaggttatcaattcttcggtgtattatacattggtgctattttaactaaagatggtccaaaagtaattgaatttaatgcccgttttggtgatcctgaagctcaagtattattaagtcgcatggaaagtgatttaatgcagcatattattgatttagatgaaggaaaccgtactgaattcaaatggaaaaatgaatctattgtaggggtcatgttggcttcaaaaggatatcctgatgcatatgaaaaagggcataaagtaagtggctttgatttaaatgaaaactattttgttagtggattaaagaagcaaggtgatacctttgttacttcaggtggtagagttatacttgccatcggaaaaggtgacaatgtacatgatgcacagcgagacgcatacgaaaaagtatctcaaatacaaagtgaccatttattctatcgtcatgacattgcgaataaagcactacaacttaaataagtatatttaaaaatactaagattagctatgaacgaatctataacgatagattttttcatagcttttttagttgtagagtctaggacattgatttctgtaccaaatttgtgattatgtatatgtaataaaaaagaggcgccacaacatgtttggatgaacaaaataacatgtttgtggcacctcttttgtttagtatggaataaatggttttctttttctatacaatgaatttctaatttagtatctatacaattatggataaaatttaacctacacgaccaagacgaacatcatctatgcccgtgatgggtaaggtgattgaacaataatatgccaaagtaataatggcaattaaaactataataaagattacatctttatatgagaaaggtacgttgtaatagtaagtacgaggaccatctctaaatcctttcgactccatcgcaactgataattgatgagcctttctaatgttttggcttaatagaggtatgattaaatgcttaaatcgctttaatcctctataatttgctgcgtctatcatctgatagcgcatttttaaagatctgcgaagctgtattaaagaactaatcattaaaggtatcatacgaatggcagccatgaatgcataagcaacttttgatttaacctttaaatgttgcattaaactataaaaaatcatgacaacctgagatgtgagtgcgattaagataccgaaaaatgaaatagcaatggttcttaatgaaacatgtaaaccacgaactaaactttctgttgtaatatggataaatccgaatttcaaaattgtatggctaccgttcccgtataaaatcatgaacagggaagagagtaatgcaaagccaatacttatagttataaaaattgctgtaattttaaactgagtaccattaaacatcaataagaaaactaacattaagatagtgatataaagcataaaatcgaaattatgcacaaatataataaagaaaaatagtataattccaagaaatagtttcgttataatgttgacatcatcaacaaatgattgccgaactttccattgctcatacattcgtatcaccatcacaatctagtaacgcaccatctgaaattttaagtcttcttgatggataacgttcaattatttcatcgtcatgtgtaaccatgacaatactttgtcccaaattaattcgtttttggaaaagtttgatcaactggaatgtattatggctatcaagtccaaatgtcggttcatctaaaaagatgatatcagctttagaacttagtgcggtagctacgctaaggcgtcgtttttgaccaatagacaactcataaggatgttgatcttttacattttctaaatctaaaagttttaaaagttgtatcgtttcatcatcactttgatctttagaaaggtgattaaaatgaatgttaatttcatcataaaccgaatttgttataaattgtaattctgggttttgataaactagatacatgtgttttgctgcatgtttaatttttgttaaacgctgattttcaaaataaacatcaccttgatatttaatcaattgcataattgattcaagcaaggttgttttaccactaccatttgcccctgtaattgtaatccactcacctagaccaatttctaaatctgagaatgagagcaacgttgatttaccgcgaataatacgtccatttttaaattgtaataagtgtgagtttgttgttggaaagtcaacacgacttggtgcgaattcccatgcacgtggatgccacacaccatattcactgagtaaatgaacatacttctgtaatatgatttcaggacattcatcggcaatgatatttccgttataatccatcaaaatgacgcggtcgacatgattccagatgtgtttaactttatgttcaacgattacaacagtttgatcttcccaaagttcaattagtttagtccataaatcttccgttgcttgaacatctaacattgctgtcggttcatctaaaaacaatgtttttgattgttgaagaatggtttcaacaattgccaatttctgtttcatcccgccacttaaatctttgatatacgtttcaggggtaacatttaaattgaccatatttaaagcattgataattaacgcatccatgtcttcacgtggtacttgtctattttctaaaacgaatgcaagttcttcgtatacttttggcatacaaaactggctatcagggtcttggaaaataacgccacttaatgggtcaacgattagttcatcatatttcataggtaattcaattaaattaggaacaataccacttaatacattcagaagtgtacttttaccgcaaccagaaggaccgagtaaaagtactttttctttgtcttgaatagtgatatttaaatgatcgaaaattttacgctgaccacttggatattttaatcgtaaatcacttacttttaacactctgaatgctcctcttataagttgtcgtaatcttctttagcagctggtctaaataattttgttacgcctgtcttatctaaagcttttactaaaaggtaagataggacgccggcgactactgcaccactaattaatctaaatacgatgaataatgttaagttccaacctgcaacttcatttaaataaccatagaaataatctatcgggaaagccgcgattgctgtacaaaaacctgctaacatagctaccataactgaacgagattgatatttaaaaattgcaaagacaagttcacacgctaaaccttgtataaaagcgtaaacgattgtcggaatatcgaaacgacccataatgatagtttcgccggcacctgcagcaaattcagccagtaaagcaatacctggttttggaataattagatagcagacaatcgctgccatgaaccaaaccccgtttgttaattgttcgaggtgaaggcctgtagcttgcacaccattgtaaacaaaccaccataaattgtaaataactgcgaatactactgaaataagtacggttactagtatttcagatagctttaaaccttttgacatttttacatcctcctaataaaaaaacgcacaaccatccataggaaagttatgcgttcacaatatatattagtaaaacatatgtatagtaacactttcctacgctagttcaagctagatcaggttcaaagggtttgagggcaagcctcatctcagtataaaacacccctagtgtgtgcgatttatttaattaattatactgtaagacgtttataaacttatgtcaataggttagcttcatgaaatgtcgtttaattcgatttaaaatttataatattagtattggatttaaattgaagatgtagtaggaatgttagtaattaaagatataaaaatatgtgacatgtaataatattgagctgataaatgaagaggggtacttatcaatcatacctatttaacaacagtgaagaatccgtgcataatggcttatgaattatagtttgtaaggtaaaagagggatacttgcgtcgagcgcaagcaaaaaagcccctaacaactaaaagttgtaaggggctctaaattaatttagtgtatcttggatatcttgttttgtttgattaatatcttctgttttttcttcttttttatcttttaatttttcttcaacttctttagctttttctgctgcttttttattttgattttcattagacatgattaattcctcccaaattggataattatttatatataaatcttacccggttgtactttcgttaaacttttctaagtctatagcactatttattcatttatctaaagacaacaacattagattaatatataatgattttgaggtgaacataatgtcttttcttaggaaacacgccgaaattatttttagctatttaatcggtatcgtttcactcttcactggtctcattattttaattaacttgccattaattaaacaattaaatggtggtaaaaaagttgatacacatgttcataatgtgtgggaatttctgaatgcatttttcagtgaaattattaaagtaatgagtcgttttataggtaatttccctatagttagtgcaattgtgataattatattcggtattttagttatgttgattggtcatacattacttagaactattaagtatgactatgatatttctatctttttcttagttatcggtatcatgtactttattattactcttatattaatgacacaagtttatggattctttgcagtgattttcattattccatttacaattcatataggatatatcgtctataaagatgaattgaatcaggaaaatgtaaaaaatcattacatgtggataattgtgagttatggtataagttacttaattacacaaattgcattgtatggcagaattgatgctaatgaaatagagtcaattgatatcttaagtgtcaatgctttctttataattatgtggttacttggtcaaatggctatttggaatttcttgttcttgcgccgagctttacctttaacaaagcaagaattaggtgaagaggagccagaattatcaagaacaagtaaagggaatgtcacgaatcaaactaaaattcacttgaaacaactccaagataagactacagaatatgcacgtaagacaagaagaagtgtcgatttagataaaattagagctaaaagagataaattcaaaaagaaagttaatgatattatcgatattcaagaagacgatattcctgattggatgagaaaaccgaaatgggttaaaccaatgtatgtcgaactattttgtggtgtcgtcatctttttattcacatttttagaatttaataatcgtaatgcattatttgtatctggtgattggaaattatcacagacacaatatgttattgaatgggttacattactaattctgttattcattattatcgcatatatcgctaccacgttaactttccacttgaaaggtaagttttattatttacaactatttatggggagcattttattctttaaattgttaacggaatttataaatataatgattcatggactactactttcagtgttcattacgccaacattactattaatgttattggcaatcatcatttcttattcgttacaattacgagagcgaccataattaaaagcattataaaagtactatctattaaacattttgatgtgtacgctataagttagatatatctctaacttatttagatacaggtcaatgaagtttatggatagtactttttttgtaactagatttgattgattcaggtgatgcgaattaagtattgaaaattgtatacaaagttttagtgcaaataaaatagttgaaaagttatccatttgtaaaatcaagaaaactagtaaatagttgaagcgacatatggaatttgcgaaacgacatatagtatttcctttgtagaaatttaacatatatcattcgaattactaatttgttaaaatcaacagtaagattagaagtagatgatattgaaatttggcaaacaatttaatctatataaaactacaacgaaacacagaaaggaagttgtcagatgaaaatagcaactctgaacaaaggcaaagaaacaaaatattttaatggatatcctttaattgaagaagaggatatctattcacaagatcatttaaaagaaggagatatttttcaaattgtgactgataaatcacaatatgttgcaacggcttatgttggtcgccaacataaaggattaggttgggttctaacatacgataaagctcaagaaatcaacacagctttctttgtgaaattgtttaatactgcattagcagaacgtgattattattttaatatagatggaacaaatgcttttagattatttaatgctgaaggtgatggtgttgggggattaacgatcgacaattacgatggccatttgttgattcaatggtactcaaaaggtatttataaatttaaatatgccattcttgaagcggttagaaaagtatttgattataaatctatttacgaaaaagtaagatttaaagacagcgaatatagtggtggttttgttgaaggcgatgcacctgagtttccaattgttatcgaagaaaacttcacattttataacgtagaccttgaagatggtttgatgacaggtatctttttagatcaaaaagaagtgcgcaagaaattaagggatcaatatgccaaagaacgccatattttaaacttatttagttatacaggtgctttttctgtaatagcagcaagtgaggcatcttcaacaacaagtgtagatttggctaatcgttctcgtagtttaactgaagaaaattttggattaaatgctattgatcctaaatctcaatatatatatgtcatggacacttttgatttctataaatatgctgcacgtcatggacatagttatgacacgatcgtgattgatccacctagctttgcacgcaacaaaaaacgtacattttcagtgcaaaaagattatgacaaattaattaatggcgccttaaatatcttatcatctgaaggaacattattattatgtacaaacgcaagtgtatatccattaaagcaatttaaaaatactattaaaaagacacttgaagagagtggtgttgattatgaattaactgaagttatgggattaccaaaagattttaaaacgcatccacattataagccatctaaatatttaaaagctgtttttgtaaatattagacattaatttgataaaaaggggtatagtaacttattgagaaaaagaagggtgataatattatgggattcaaaaataatttaacgtcaaatttaactaataaaattggtaattcagtttttaaaatagaaaacattaatgaaaagggggcaatgcctacgacaattaaagaattaaatgaaagacgacaacgcgctgaagcaattgtaaagagaaagtctttaatgtcatcaacaatgagcgttgttccaattcctggattagattttggtgttgatttaaaattaatgaaagatattatcgaagatgttaataaaatttatggtttagatcataagcaagttaatagccttggagatgatgtgaaagaaagagttatgtctgcagcagcaattcaaggtagtcaatttattggtaaaagaatttcaagtgcatttttaaaaatagttattagagatgtagctaaacgtactgctgcaaaacaaacgaaatggttcccggtagtaggacaagctgtatctgcatcaattagttattattttatgaataaaattggaaaagatcacattcaaaaatgcgaaaatgttattaaaaatgtcatgtaggtgctataatagttttgcaatttgcaaattttactgaaaccggttttaaacgaattgaatttaaagcatggttttggtaaagttaatgtataaaactaagttagtattgtaataatattgaagattctaactatacgaaggagaaatgtaattatggaacaaaattcatatgtaatcatcgacgagactggtattcacgctagaccagcaacaatgttagtacaaacagcttcaaaattcgattctgatattcaattagaatataacggtaagaaagttaacttaaaatcaatcatgggtgttatgagccttggtgttggtaaagatgctgaaattacaatttatgctgacggtagtgatgaatctgacgccattcaagcaatcagtgacgtcttatcaaaagaaggattgactaaataatcatgtctaaattaattaaaggtattgccgcatctgatggtgttgcaattgctaaagcttatttattagttgagccagacttaacattcgacaaaaatgaaaaagtcactgatgttgaaggagaagttgcaaagttcaatagcgctatcgaagcttctaaagttgagttaactaaaattagaaataatgcagaggttcaactaggtgctgataaagctgctatctttgatgcacatttattagttttagatgaccctgaattaattcaaccaatccaagataagattaaaaatgaaaacgctaatgctgctacagcattaacggatgtaacaacacaatttgttacaatttttgaatctatggataacgaatacatgaaagaacgtgcggctgatattcgcgacgtttctaaacgtgtgttatcacatattttaggtgtagaattaccgaatccgagtatgattgatgaaagcgttgttattgtagggaatgacttaacgccatctgatactgctcaattaaataaagaattcgtacaaggttttgctacaaacattggcggaagaacaagtcactctgcgattatgagtcgttctttagaaattccagcaattgttggtacaaaatcaattactcaagaagttaaacaaggcgacatgattatcgtagatggattaaatggtgatgtaatcgttaatccaactgaagatgagttaatcgcttatcaagataaacgtgagcgttattttgctgacaagaaagaattacaaaaactacgtgatgctgatactgttacagttgatggtgttcacgcagagcttgctgcaaatattggtacacctaatgatttgccaggtgttattgaaaatggtgcacaaggtatcggtttatatagaactgagtttttatatatgggtcgtgaccaaatgcctacagaagaagagcaatttgaagcttataaagaagtattagaagcaatgaacggtaaacgtgttgttgtacgtactttagatataggtggagataaagaattatcatacttaaacttgcctgaagaaatgaatccattcttaggttatcgtgcgattcgcttatgccttgctcaacaagatattttcagaccacaactacgtgcattattacgtgcatcggtttatggtaagttaaatatcatgttcccaatggttgcaacaattaacgaatttagagaagctaaagctatattattagaagaaaaagaaaaccttaaaaatgaaggtcatgacatttcagatgatatagaattaggaatcatggtagagatacctgcaacagcagcattagctgatgtctttgctaaagaagtagatttcttcagtatcggtacaaatgatttaattcaatacacattagctgctgaccgtatgtcagagcgtgtatcatatctataccaaccatataacccttcaatcttacgtttagttaaacaagttattgaagcgtcacataaagaaggtaaatggacaggtatgtgtggtgaaatggctggagatgaaacagctattccattattacttggtttaggtttagatgagttctctatgagtgcaacgtctattctaaaagcaagaagacaaattaatggtttaagtaaaaatgaaatgactgaacttgctaaccgtgcagtcgactgtgcaacgcaagaagaagttattgaattagttaacaactacgtaaaataattaattctttcgaaagacagaattataaataaacccgaagtattcattgtgagtaattatgaatacttcgggttcttttttatgatttatgttaatttcaaggaatgttgttgctaactaattaaacaactaggtgtcattggcaaaatgttgttcttcaattaatgttaattaatttaaaaatcgatatttaatttatgatagctaaaaatgatggagttgatttagatgaaaattaatcttgtatatttaatactttgttgatttcatcaagatcaacatggtacattggattgccattcaacaaaataaacggagttgaaaaagcattaaaatctatcatttcgtttcgatattgttgattgttgatatttctttcttcaaaatcaatttgatgctcatttagataattttttacaaatgtacaaggtggacaatcattctgcgtataaacgattatttctgacatgtatcatgctccttcgtgctttattctaatgtaatatacacaattatacattgaaattcaaatttgtgaacacattgtgaactgacataaattatacacaatttcatagcgcataatgttttaaaaatacacattatagcaattataattaagttcattgtgttgtcatcaaaaaaagaaaaaggtgatgtttttaaatggatacagttgaaatcagtcggtttttgacagctatgactttagcagttcatatcatttttgcaacgattggtgttggtatgcctttaatgttcgcaattgcagaatttttaggtattcgcaaaaatgatcttcaatatatagctatggccaaaagatgggctaaagcttatacaattactgtagcagtgggagttgttacaggtacaattataggacttcaattatcattgatttggcctacatttatggaaatgggtggacacgttattgcacttccattatttatggaaacatttgcgttcttctttgaagctattttcttaagtatatatttatatacttgggatcgttttaaaaataaatggacacatttcttaattagtataccagtaattattggtggctctttctcagcattcttcattacttcagtgaattcatttatgaatacgcctgcaggttttgagttgaagaatggaaagatggtcaatgttcaacctatagaagcgatgtttaacccatcgtttatagttcgatcatttcacgtaattactacagccggtatgacgatggcatttgttattgcatcaatagcagcttttaaattattgcgtaatcgtcaacctaaagatactgtctaccataagaaagctttgaaaatgtctatgatagttggattcttttcaactttactttctatgttggcaggagatttatctgcaaaatttttgcataaattccaacctgaaaaattagcagcttatgaatggcatttcgatacatcttcccatgccaaattattattatttggtgtgttagatgaaaagactcagcaagttaaaggtgcgattgaattacctggactattgagtttcttagcagataatagtgtcaaaactaaagtgcaagggttaaatgattttccgaaaagtttacatccgcctatgattgtccattatttctttgatttaatggtaacgatgggaattttatgttttgtcatttcaggtgtttatgtcttaactttaatgtttaaaaagcttagaaagttttctactcataaatggatgctttacggaatattattaacaggaccagcttcaatgctagctatagaatttggatggttcttaacagagatgggtagacagccttggattgttcgtggttatatgcgcgtggcagaagcagcaacacaagcaggcggaataaccttcgttacaattttatttggcatattgtacatcattttaatgtatacatgtgcatacgtattaattcgtatgtttaaaaataaaccggcgtatgaagatgtaaatcgtttagccaagaagcaaggaggagaaatagaaaaatgatttatgcatttataggtataacagtgttatggttgtttttattttgctatatcattattgcttctatagattttggggcaggtttcttcgcattgcattcaaagttaactggtgatgaaaagaaaattaatcacttaatttcacgttatttgaacccagtttgggaagttacgaatgtattctttgttttcttcttcgtaggattcgtaggtttctttccagagtcaatcaaatatttaggcacggtattgttaataccaggttcaatagcactgattatgatatcgttgagaaacagtttttatgcatttgaaaattatggtcaagatacaaaattagcatggatgatcatgtatggggtaagtggattattaattccagcttcattatcaactgctttaactattacagaaggtggttatattaatgttcgaaacaatgttatcgatctagattgggtgcagttactattaagcccatttgcttggtctgtagtattcttggcaattatttcagttttatatatttcatcaggatttttgacatattatgctaaaaaagcaaatgacgaacctgcatataatttaacaagacaatggcacatatttttagggccaccgatgattatcatttgtttattcgtatttctatcattacgcattcaaaattctgaacatttttattcagctgtttttgactactggtggatgtttgctataagtttcttattctttacattagcttcattgttaacattctttaagaaaaaacatggtttggcttttgtatttgttattttacaaatgatgttcgcgttctttggctatggaattagtaaattgccataccttttatatccgtttgtaaaaattacagatgcatatgttaatccagaaatgggctggacattagtgattgtctttattttaggtttacttttattacttccatcgttaatattattattaagattatttgttttcgacaaagaatatgttgaaggaaagaaatcataagttgagacgatagcccaactttcatttacttgcattactgcatttagataatttagttggggtactcatttataataatttcaaatttatattttcaatgaattgatgaaaatcatttaatggagggcgagtatgggtaaagaatatgtagtcatcggtctaggtcgttttggaggtagtatcgttcgtgagttgaatgcattagacatggatgtaatggccatcgaccatgatgaaaatagagtgaatgaatatagtgatatcgctactcatgcggttgttgcagacactacagatgaagcagttatgaaaagtttaggtatccgtaactttgatcatgtcattgtggcaattggtgaaaatattcaatcaagtacgttgacaactttgattttaaaagagttaggtgtaaaaaaagtaactgctaaagcacaaaatgattatcatgcaaagattttaaataaaattggagcagatacggttgtgcaccctgagcgtgatatgggtagacgtattgcgcataatgttgcgagtgcaagtgtacttgattatcttgagttggcagacgagcattctattgtagaattgaaagcaactgaaaagatggcggggcagtctatcattgatttagatataagagcacaatatggaattaacattattgcaattaaacgaggcaaagagttcatcatctcaccaaatccaaatattaatttagaaataggtgatattttaattatgattggacatgataatgatttaaatcgctttgaaaaaaatattgcgacgagataatcgataatcatttgtttgatatattcaaataaatatcatatataaagaaaaagctactaacaatgtgtggtgagtttaattaaaacttcacttcaaagttagtagctttttgattatttattgtttgattctttttgttcgtttaccttcataatgactggtaaaatcattggttttctagctgttttttcaaataaataaggttgtaatgtttcaatgatagaagatttaatctgatgccattgaatatctttattttgatttaacttactaataacatcagttttgattttgcgttgtgcatcataaattaattgtcctgattctctcatatatacaaatcctcgagaaataatgtctggaccagaaagtaatttatttgtattaaaatcaatactaacaacaacgataactaaaccttcttcagataatagcttacggtctcttattacaacattaccgatatcaccgataccgctaccatcaacaagtacattaccagatggaatgcgaccagctttacgtgctgaatcgtgtgttaaagctaagacatctccgatatcaaagatgaaaacattatcttcttcaacaccgcattcaacaccagtctcaccatgtgcttttaacatacggtattcaccatgaataggtaagaaatatttcggcttgattaatcgaagcattaattgttgatcaccttgagaaccatgccctgaagtatggatgttagaaatcttgctatggataacatctgcaccagctttatacaaggaattaatagttctgttaatactttttgtattacctgggataggtgatgaactaaatacaacggtatcttcaggtataattttaatttgcttatgagtaccattagcaattctagataatgctgccattggttcaccttgagaaccagtacatagtatcaataactcatgcttcggtacggtattaattttattaggctcaataaatgtttcaggtggtgctttaatataaccaagttccataccgattttaatattgttttccatcgaacgaccgaacgtaacaattttacggttatttttgatagcagcttcaactgcttgttgaactcggtaaatattagaagcgaaggtagcaaatataatacgacctttacagttacggaagatcttatctacgttttgaccaacttcacgttcgcttaaagtaaaatcaggcacaagtgaatttgttgagtctgaaagtaaacatagaacgccttcttcgcctaattgagccattttagcaatgtttgctggtttgcctacaggtgtaaaatcaaatttaaagtcaccggtatgaactacttttccttcaggtgtatctacgatgacgccataagtttcaggaatactatgcgtagttaagtagaaagaaatcgtaaagtgcttagattttatcacactgtcctcattgatttcatttagtttagcagtacgtaataaatgatgttcttcaagtttattacggattaaacctaatgctaaaggaccaccataaataggtatattaagttgttttaataggaagggcacaccgcctatatggtcttcgtgaccatgtgttataaataggccaacaattttatcttggttttgaactagatatgtgtagtcaggtataacataatcaatccctaataagttatcatcagggaatttgatacctgcatcgataatgacaatttcgtctttatactcaactgcataagtatttttaccgatttcacctagacctccaagtgcatatacacctacttcatttggatgtaattgtttcattatttagcaatctccacattaaagtgttctgagttttctttttcgtaatctaaatgtgcgccctctaatttagtgataaattcgatattaaaattacgatctttcaagtaacgacgtacttgttcttctgtttgagcttcaacataaagtgattgtgtattttcacgcacaattacctcgtctctgttatgttgataaaaaactttaaatactgccatgttaaaaattcctcctaagaatgtttgtttaatttattgttaaccctagtaaaatcgtattggagtatatatcgataaattcaatccaatcatctctataatttaacttaataacgatttggttaataactaggttcatcatgtcgttcattttaaaaaattagtgaaataacactaaaatttcagttaaatcttattttacatgatgaatgataataaataaagcagtttatctcactagaaatctaagtatttcgaataaatgtgcagttctatttattaaaaataaatgtagagattataaattaatgttaagaaagaattaaaggattttatatgaaacggtaaaatttaaatgaggggataaaaagtttggtagaaaggtgaatatattttactgttatttattaggaaaagttgtaaaagaaaaagcttaggacatcatatttatcctaagctttgataattagtaatagtgtgttttaaacttctacagcatctgtatgtggttgtaatgggtggtctttgtcaatgtgatcatagaacattacaccatttaaatgatcaatttcatgttggaaaacaattgctggatatccttttagtcgtaactgtatatcattaccttcgatgtctttggctttaattgtaattctattatgacggtgaactagaccagcaacattatcatcgacactaaggcaaccttcaccagttggtaaataggcttcttgaacgctatgacttacaattttggggttcacaagcatatagtcataagatttgccactgccatcatctggtattaaaacagcaatcatacgtttagaaatattaatttgaggtgcagccaaaccaacgcctgaacgtaaaccgtatcgtttcgcgatttcctcatcttgactatttactaaaaactctctcatggcgattaatgtttctttttcttctttagttaatggtaattctaactcggctgctttttgacgcaaagttggatgaccatctctaatgatgtctttcattgttaacatatattgcaccttccttattttaatttgttttagttgaatgacagtaaaaaggttgttaagatactcatacatttttatgtgtaaatatgtacaaagttaaccaactactgccaatgtttattttagatagtatatgtaaattttcagatatgctaattgcctaaaaaatgattaaagtgttgatttcaagcaatgatactttagaaatttatttatcatcttgactttaaaaattatattataaatgacgtaactgtcaacagatatacttagtaatgaagatgtgtaatgtaattgtttaaaattgatttccaagcagattttatttatcatttaatttaaatagcaagtggaggtacaagtaatgaaatttggaaaaacaatcgcagtagtattagcatctagtgtcttgcttgcaggatgtactacggataaaaaagaaattaaggcatatttaaagcaagtggataaaattaaagacgatgaagaaccaattaaaactgttggtaagaaaattgctgaattagatgagaaaaagaaaaaattaactgaagatgttaatagtaaagatacagcagttcgcggtaaagcagtaaaagatttaattaaaaatgccgatgatcgtctaaaggaatttgaaaaagaagaagacgcaattaagaagtctgaacaagactttaagaaagcaaaaagtcacgttgataacattgataatgatgttaaacgtaaagaagtaaaacaattagatgatgtattaaaagaaaaatacaaattgcatggtgaatactctaaagcttataaaaatgctgtcaattcagaaaaaacattgtttaaatatttaaatcaaaatgatgcgacacaacaaggtgttaatgaaaaatcaaaagcaatagaacagaactataaaaagttaaaagaagtatctgaaaaatatacaaaagtactaaataaggttggtaaagaaaagcaagacgttgatcaatttaaataattaatatgatacagatggtagggaacaactaatacagttcctattatctgtatctttttttattaaaacagaactttttcaaatggtttaacaggcccatttatttgtggtacaattagtaaggataaaatgaatttctatacaattatgggaaaggtatggtgaattgaatggctcctaagttacaagcccaattcgatgcagtaaaagttttaaatgatactcaatcgaaatttgaaatggttcaaattttggatgagaatggtaacgtcgtaaatgaagacttagtacctgatcttacggatgaacaattagtagaattaatggaaagaatggtatggactcgtatccttgatcaacgttctatctcattaaacagacaaggacgtttaggtttctatgcaccaactgctggtcaagaagcatcacaattagcgtcacaatacgctttagaaaaagaagattacattttaccgggatacagagatgttcctcaaattatttggcatggtttaccattaactgaagctttcttattctcaagaggtcacttcaaaggaaatcaattccctgaaggcgttaatgcattaagcccacaaattattatcggtgcacaatacattcaagctgctggtgttgcatttgcacttaaaaaacgtggtaaaaatgcagttgcaatcacttacactggtgacggtggttcttcacaaggtgatttctacgaaggtattaactttgcagcagcttataaagcacctgcaattttcgttattcaaaacaataactatgcaatttcaacaccaagaagcaagcaaactgctgctgaaacattagctcaaaaagcaattgctgtaggtattcctggtatccaagttgatggtatggatgcgttagctgtatatcaagcaactaaagaagcacgtgaccgcgcagttgcaggtgaaggtccaacattaattgaaactatgacatatcgttatggtcctcatacaatggctggtgacgatccaactcgttacagaacttcagacgaagatgctgaatgggagaaaaaagacccattagtacgtttccgtaaattccttgaaaacaaaggtttatggaatgaagacaaagaaaatgaagttattgaacgtgcaaaagctgatattaaagcagcaattaaagaggctgataacactgaaaaacaaactgttacttctctaatggaaattatgtatgaagatatgcctcaaaacttagcagaacaatatgaaatttacaaagagaaggagtcgaagtaagccatggcacaaatgacaatggttcaagcgattaatgatgcgcttaaaactgaacttaaaaatgaccaagatgttttaatttttggtgaagacgttggtgttaacggcggtgttttccgtgttactgaaggactacaaaaagaatttggtgaagatagagtattcgatacacctttagctgaatcaggtattggtggtttagcaatgggtcttgcagttgaaggattccgtccggttatggaagtacaattcttaggtttcgtattcgaagtatttgatgcgattgctggacaaattgcacgtactcgtttccgttcaggcggtactaaaactgcacctgtaacaattcgtagcccatttggtggtggcgtacacacacctgaattgcacgcagataacttagaaggtattttagctcaatctccaggtctaaaggttgttattccttcaggcccatacgatgcgaaaggtttattaatttcttctattagaagtaatgacccagtcgtatacttagagcatatgaaattgtatcgttcattccgtgaagaagtacctgaagaagaatatacaattgacattggtaaggctaatgtgaaaaaagaaggtaatgacatttcaatcatcacatacggtgcaatggttcaagaatcaatgaaagctgcagaagaacttgaaaaagatggttattctgttgaagtaattgacttacgtactgttcaaccaatcgatgttgacacaattgtagcttcagttgaaaaaactggtcgtgcagttgtagttcaagaagcacaacgtcaagcaggtgttggtgcagcagttgtagctgaattaagtgaacgtgcaatcctttcattagaagcacctattggaagagttgcagcagcagatacaatttatccattcactcaagctgaaaatgtttggttaccaaacaaaaatgacatcatcgaaaaagcaaaagaaactttagaattttaattcattttaaaagttaacgaagttagcgtattttagtctcattgattaaaatgaaatgtttaatttacgaaatcttaggagggcaaaaacgtggcatttgaatttagattacccgatatcggggaaggtatccacgaaggtgaaattgtaaaatggtttgttaaagctggagatactattgaagaagacgatgttttagctgaggtacaaaacgataaatcagtagtagaaatcccatcaccagtatctggtactgtagaagaagttatggtagaagaaggtacagtagctgtagttggtgacgttattgttaaaatcgatgcacctgatgcagaagatatgcaatttaaaggtcatgatgatgattcatcatctaaagaagaacctgcgaaagaggaagcgccagcagagcaagcacctgtagctactcaaactgaagaagtagatgaaaacagaactgttaaagcaatgccttcagtacgtaaatacgcacgtgaaaaaggtgttaacattaaagcagtttctggatctggtaaaaatggtcgtattacaaaagaagatgtagatgcatacttaaatggtggtgcaccaacagcttcaaatgaatcagctgcttcagctacaaatgaagaagttgctgaaactcctgcagcacctgcagcagtatcattagaaggcgacttcccagaaacaactgaaaaaatccctgctatgcgtagagcaattgcgaaagcaatggttaactctaagcatactgcacctcatgtaacattaatggatgaaattgatgttcaagcattatgggatcaccgtaagaaatttaaagaaatcgcagctgaacaaggtactaagttaacattcttaccatatgttgttaaagcacttgtttctgcattgaaaaaatacccagcacttaatacttcattcaatgaagaagctggtgaaattgtgcataaacattactggaatatcggtattgcggcggacactgatagaggtttattagtacctgtagtgaaacatgctgaccgtaaatctattttccaaatttctgatgaaattaacgaattagctgttaaagcacgtgatggtaaattaacagccgatgaaatgaaaggtgcaacatgcacaatcagtaatatcggttcagctggtggacaatggttcactccagttatcaatcacccagaagtagcaatcttaggaattggccgtattgctcaaaaacctatcgttaaagatggagaaattgttgcagcaccagtattagcattatcattaagctttgaccacagacaaattgatggtgcaactggccaaaatgcaatgaatcacattaaacgtttattaaataatccagaattattattaatggaggggtaaaacatggtagttggagatttcccaattgaaacagatactatagtaatcggagcaggtcctggtggatacgttgcagcaattcgtgcagctcaattaggacaaaaagtaacaatcgttgagaaaggtaatcttggtggtgtttgcttaaacgtaggatgtattccttcaaaagcattactacatgcttctcaccgttttgttgaagcacaacattctgaaaacttaggtgttattgctgaaagtgtttctttaaacttccaaaaagttcaagaattcaaatcatcagttgttaataaattaactggtggtgttgaaggcttacttaaaggtaacaaagttaacatcgttaaaggtgaagcatatttcgtagataacaatagcttacgtgttatggacgaaaagagcgcacaaacatacaactttaaaaatgcaatcattgcaacaggttcaagaccaattgaaattcctaatttcaaattcggtaaacgtgttatcgactcaacaggtgctttaaacttacaagaagtaccaggtaaattagttgtagttggtggaggatacattggatcagaattaggtacagcatttgctaactttggttcagaagtaacaatccttgaaggtgctaaagatatcttaggtggcttcgaaaaacaaatgacacaacctgttaaaaaaggtatgaaagaaaaaggtgttgaaatcgttactgaagctatggctaaatcagctgaagaaacagataacggagttaaagttacttatgaagctaaaggcgaagagaaaacaatcgaagctgattatgtattagtaactgtaggtcgtcgtccaaacacagacgaattaggcctagaagaattaggtgttaaattcgctgaccgtggattattagaagttgataaacaaagccgtacgtctatcagcaatatctatgcaattggtgatatcgttccaggtttaccacttgcacacaaagctagctatgaagctaaagttgctgctgaagcaattgatggtcaagctgctgaagttgattacattggtatgccagcagtatgctttactgaaccagaattagctacagttggttattcagaagcgcaagctaaagaagaaggtttagcaattaaagcttctaaattcccatatgcagcaaatggtcgtgcattatcattagatgatactaacggatttgttaaacttattacacttaaagaagatgatactttaatcggtgctcaagtagttggtactggtgcatcagatattatctctgaattaggtttagcaattgaagctggtatgaatgctgaagatatcgcattaacaatccatgcacatccaacattaggtgagatgactatggaagcagcggaaaaagctatcggatacccaatccatacaatgtaataactgattatctataaagattcagtcattaaaagctgtagcatatgctacggcttttttgttttaggtaaagtagtgtaaggaaattgatttgagatatcgttaacatgtgacatgcatgttatactagcgatgctaacaaaagaattgaaatggagggttcaataatggaatatgagtatccaattgatttagactggagtaatgaagagatgatttcagtgataaatttctttaatcatgtagagaagtattatgaatccgacgtgacggcaggcgactttatggatgcatataaaagatttaaagaaattgtgcctgctaaagcagaagaaaaacaaatttttaatactttcgaaaaaagtagtggctataatagttacaaagcagttcaagatgtaaaaactcactctgaagaacaaagagtaacagctaaaaaataattcgttcgaaattaacacaatttaataggattttttctttaaaactattgctaataaagctatattttgatacctttatcaagtgttaaacaaaatgtttgataaaagtaaacttaatatagcttttttaggtggaaaaataaatgaacataggtaataaaattaaaaatcttagaagaattaaaaatttaacgcaagaagaacttgctgaacgtacagacttatctaaaggctacatttcacaaatagaaagtgaacatgcctcaccaagtatggaaactttcttaaatattatagaggtgttaggaacgacgccaagtgaattttttaaagacagtgaaaatgaaaaagtattatacaagaaggaagaacaagttatttatgatgagtatgatgaaggttatatattaaattggttagtttcaaagtcaaatgaatatgatatggagccattaatattaactttaaagcctggcgcatcatataaaaatttcaatccatcagagtctgatacgtttatttattgtatgtcaggtcagataacacttaatttaggcaaagagatatatcaagcacatgaagaagacgttttgtattttaaagcacgagataatcatcgtttgtcaaatgaatcaaacaatgaaacacgaatacttattgtagcgacagcttcatatttataggggggatcttatttggaaccattattatcattaaaatcagttagtaaaagctatgatgatcttaatatcttagatgacatagatattgatattgaatcaggatacttttatacattattaggtccttcaggttgtggtaaaacaacaattttaaaattaattgcagggtttgaatatcctgacagtggtgaagtgatttatcaaaacaaaccaattggtaatttaccaccaaataaacgtaaagtgaatacagtctttcaagattatgcattatttccacacttaaacgtatatgataatatcgctttcggtttgaaattaaaaaaattatcaaaaaccgaaattgagcaaaaagtaactgaggcattaaaattagttaagctttcaggttatgaaaaaaggaatattaatgaaatgagtggcggacaaaagcaacgtgttgcaattgcacgtgctatcgtaaatgaaccagaaatattattgttagatgaatctttatccgcattagatttgaaattgcgtactgaaatgcaatatgaattacgagaattgcaatctagattaggtattacatttatatttgtaacacatgatcaagaagaagcgttagcactaagtgactttctttttgtattaaaagatgggaaaattcaacaatttggtacaccaacagatatatatgacgaaccagtgaatcgatttgtagctgattttattggagaatctaatattgttgaagggcgcatggttagagattatgtcgtgaatatttatgggcaagatttcgaatgtgtcgatatgggtattcctgaaaataaaaaagtagaggtcgttattcgaccagaagatatatcattaatcaaagctgaagaaggattatttaaagcaactgttgattctatgttatttagaggagtccactatgaaatatgttgtatagacaataaaggttatgaatgggtaatacaaacaactaaaaaagctgaagtaggcagtgaagttggtctttattttgatcctgaagccattcatattatggttcctggagaaacagaagaagagtttgataaacgtattgaaagctatgaggaagtagacaatgcgtaatactaataaatttctcttaatcccgtatttactatggatggttatatttattattgtaccagttgtattactcatttatttttcatttttagatatcaatggacattttagtttctcgaattatcaacaaatttttactacaaaatatttaaaaatgtttgcatattcaattttatatgccgctttaataacaattattacgttggctatcagttatccagctgcctattatattactcgctcgaaatttcaaaatatcttattaatgataatgattattccaacatggataaatttattgttaaagacatatgcttttataggtttattaagtcacgatggcgtgattaatcaatttttccacttatttaatttaccatcatttaatttgttatttacaactggtgcgtttttagtagtggcaagttatatttatataccatttatgattttacctatatttaatagcatgaaagcaattcctaataatttattgcaggcctcaagtgatttaggtgctagtcctttctatacttttagaaaagtaatcatgccgttaacaaaagaaggtgttatgactgggattcaagtaacctttattccatcactttcattatttatgattacaagattaattgcaggtaataaagtcataaatataggtacggcaatagaggaacaatttttaacaattcaaaattatggtatgggatcaactatagctatattcttaattgtatttatggcattcattttaatcattacaaaatcatctaatgggagagggtgaatcatatgaaatggtatggaaagctgtatatcgggatacttttagcgattttatacatcccaatattctttttaatgttctattcattcaattcggctggtaatatgattcactttgaacattttacattagagcattatcaatcattatttcaaaatgatcatttaatgtcggtcatttttaatacgatagctgtagcacttttagcagcctcaatttctacagttattggtacatttggtgccattgctatttattatttaagaaataaaaagtttaaagtaactttactaacattgaataatgtcttgatggtatcatccgacgttgtcataggtgcatcattcttaattatgtttacaacgattggccattttactggtcttggtttaggattttggacagttctaatatctcatattgcattttgcatacctatagttgtgattatcgtcttaccacaactgtatgaaatgaataataatatgttaaatgctgcaagagatttaggagcgactgaaccacaattattaagcaacattattattcctaatattttaccttctattataggaggattctttatggctttaacttattcactagacgatttcacagtaagtttcttcgttactggtaatggctttagtgtgttatcagttgaagtttatgctatggcgagaaaaggaattagtatggaaattaatgcgatttcaacattattgtttgctgttattgtattaggaatactaggatattatttgattcaatacgtgataaataagaaaaaactaatcaagcgaggtgtaaaataatgaaacgttttttacaactcattataggtgcattagttgtgggtatgctttgtcttactttaagccattggtttaaatctaaagaacaagtgcatacaaatcaaaaaatttacgtatacaattggggcgaatatattgattcagagttaattaagaaatttgaaaaagaaactggcattcaagtcgtttatgaaactttcgattcaaatgaagcgatggaagccaaaattcgcaatggcggtacacattatgatgttgcttttcctagtgaatatacagttcaaaaattgaaaagagatcatttattgttaccaatagatcataataaggtacctaatattaaaaatttggattcagattatatgaatatgtcatttgataaaggcaataaatactctttaccttatttctttggaactgtaggtattttatataataaagaaaagtatccaaatgaatcatttgatagttggaagtcgttgtataatcctaaatttaaaaaccaaattttactagttgacggtgctagagagattataggcatgagtctcaacaaacttgggtataatcttaatgaccgtaattcgcaccatctaaaagaagcagagcgagatttaactaaattagcaccacaggtaagaggtgtcgtaggtgatgaaattaccatgatgcttgaacaaaatgaaggtaacattgcggttgtttggagtggtgttgcagcacctctagtgcaagaaggggataaatataactatgttattcctaaagaaggatcgaatttatggttcgacaatatggtaattccaaaaacggcacaaaataaagagggtgcatataaatttatgaattttttattagatgctaaaaataacaagcaaaatacagaattcgtaggctatgcaacgccgaacaaggctgcacgacaattgttgcctaaagagattaaagatgaccatcgtttctatccgactaagaaagagcaagaacgccttgaagtttataaagatttaggacctgaagttttaagtgaatacaatgaaaactttttgaatttcaaaatgtcattaaaataaaatcataaatagtagttatttactgtatatttagttataataacgggataagtactataaggagttgtaacgaatgactggagaacaatttactcaaattaaacgtccagtaagtagattaactgaaaaagttctaggttggttatgttgggtgatgttattagtgcttactgtcattacgatgtttatagcacttgtttcattcagtaataacacatcgattgctaatcttgaaaatacattaaacaataatgcatttatccagcaattattagctggaaatggctataatacaacacaatttgtaatatggttacaaaatggtatatgggctattatcgtttactttattgtttgtttgttgatttcatttttagctctcatatctatgaatataagaatcttgtcaggtttcttattcttaatatcagcaattgtaacgattcctttagttttacttatcgttactttaatcattccgatattattctttattattgcgatgatgctatttataagaaaagataaagttgaaatggttgcgccacaatattatgaagagtacaatggaccgatttatgattatcgtgaacctgtgtatgagcgcccacaaccgaaagatgattattatgatgtgcctaaatatgaaaaagaattggataaatcaaacactgtatatgatcaagaacaggaaagagataaatatgatcaatttcctaaacgtgcagttgaaagtgaatataatcatgatgagcgcactgaggaagaaccatcagtattatccagacaggctaaatacaaacaaaaaagtactgaagaactaggtattgaagatgatggttattatgcagaacctgaagttgatccaaaagaattgaaagcacaacaaaagcgagaaaaagctgaaattaaagctaagaaaaaagaaaaacgtaaagcttataaccaacgaatgaaagaacgtaggaaaaatcaacctagcgcagttagtcaacgtcgaatgaattttgaagagcgacgtcaaatttacaacaatgatatttctgaagaacgcaattcaagtgaagttaaggacaaaaaagagcaagaataaatattgatgatacccagattagtaagtagaggtcttttgcttattaatctgggtttttatatgaggttaatcatcgataacgtttaattaaagtgtttaggtgtcaaaattttaaatgacgatttctcattaccatacacctaaattaccatcaatctgaattcagatgcttattataaaaattagatgaaaaatatgttaatatacaagtaaattaatgtgcgtatatctataggctcgtagtatacttattaaaatattaaacaaagaaaggattttaagatgaatagaaaacctgaattaatcatggcttggattgcaaatagtattagtattatttatttattagttatggggctatcctatttttctttaaaaagtggtaatgcatcacaacgtgaagaattagcgaagcaattatctcagaacggtggcaaggtttctttagatatgcttcagacaacaattggtgcattagcaattattttattaatttcaacactttatggtatatttgcgacaatttgtattaaagggcgtagaaaattatcgattatactttttgttatcgcgataattgtaagtttgatggctcttaatttaattgcaattgtcttatggattatcgtgatgattatgttgatttctaaaaaagaatcaaaagaaactacacataaggacgatgagtatatttatcattaatatgttcatagcaaaagaaaaaccattaaaatgttaagttgttaattattagatacaaccaacattttaatggttttatttttaaccttgtagttcttggaatgtttgaacgattaaatagacatttaaaatacttagaataataataagtgtccatgaaatgatattaacccatgttttattatagaaaggtcccatcaagtctttattactagttgctaattgtaatggtattaaacagaacggcagagcaatacttaagaatacttgagagaatacaagtagctgctcaattttagctgcattacctttaaaaatgattaaacatacgataacaggaatgacagcaagggaacgtgtaattaaacgtcttaaccaatttggtatgtgtaatcttaaaaatccttccattacgatttgtcctgctaaagtaccagtaatcgttgaattttgacctgacgctaataatgcaactgcaaataatgtactcatgattgcacccattgttgcacccagtacaggttcagtttttaaggcatgatataaatcatagaaaccacctaaatcgtcagcgtttgagttgaaaaatagtgatgctcctaatactaataataagcaattgactacaaatgcgattgataactgaatgttcgaatctatcgtagcaaatttaatcgcttgcgccttttcttcattgttatgtcttgagtatgttctagattgtacaattgatgaatgtaagtacaaattatgaggcataattgtagctccaataatacctaatgcaatatagagaatgccgttatttgtaatgatttcactatgtggtataaatccatttaacacagcgttcaactgtggtgatgaaatatagacttcaaatataaagatgaataacactgtgaaaattaatgtaccaacaatagcttcaatttttctaaaaccatatttcattataaatagtagtaaaaatacatcaagtacagttattagtgcaccgacgattaaaggtatgttaaataggagattgagagcaatagcactaccaataacctcagcaatatctgtggcgataattgctagttctgcaataatccaaaagattatagcaataggtcttgataaataatgtcgtgtcatttgagctaagtccatacctgttgctattcctaatctcactgtcatgctttgaagtaacattgctgataaacttgaaataagaattacgaatagcaaagtatagccatattgcgcgccaccttgcattgatgttatccagtttccgggatccatgtaaccaacagcgactaataacccaggcccaagaaatgataaaaatttctgtttatttgaactgcgatgatcgaatttaattgtattgtttatttcgtctaaacttaattgttcatttgttgaatgtcgtttattattcattttgactcacctctacttcttatggacaatataataacctaataaaatgcttaggtcaacctaaatttattttattttttttaaaagtatgaattattatgttgaacgttcgatttaaaggtaagcgaaaagagcacgaaatcagtgatgtgattacgtgctctattatttaaacaaagttatttatgcagaataaaatggtaagaactgatcgaaggtttcttctaaaaatgcaataaatgctttgtcactttttaatcttttatcttgtggtgtgattgcacgcgctataaagaattcacctttttttacattgatggctctttgtatcgcttcttttaaatcatcatccgttaaatctttaataaatggtttatcaggtttcatatgatctaagcaaacacgataatcatcaggtaattgttgaatagctttaaattttctttcaaaaacttttgcacgtgttgctttatcttttgcttcatgcatgattccaaacataacaaacagttgatcttcaaacataccaatttggaaatgaggtaacattttatagcctcttttgtttgttgcaaaagcaacccatgtatctttaggaggattcacacttcttctagcatgctttgctacgtgaggataaaatgtttcaccagtttgacttgtaaagaagtcactaaaatattctcctaattcatggagttgtggtcgtatgtattcgtttaaagcttccattcgtgcgtctaagccttctacgttgaacgctttgaaatccttaggtttaaatgtgtattttgtcatagagtacctcctgtatagtgtttaaaaatattgtagcatatgttttatcaatagtagcttaagatgctctcattaaaattagtattttcatttttatcataagaagttatttttataaaatgttgatgtataataaagatgttaggagatgatgttatggcactttatggatttgcccaaggacttattaaagaagcaggaattagaattaaacaattgatggagcaaaatttaacaattgaaacaaagtcaaatccgaatgaccttgttacaaatgtagataaagcaacagaagattttatttttgatacaattttagaaacatatcccaatcatcaagtattaggtgaagaagggcatggtcatgacatcgatacttccaaaggtacggtatgggttgttgacccaatagacggtacattgaattttgttcatcaacaagaaaatttcgcgatttcaattggtatttatatcgatggtaaaccttatgcaggttttgtatatgatgttatggctgatgtcttatatcatgctaaagtaggggaaggtgcatatcgtggtagccaacccttgaaaccattgaatgattctaatctaagacaaagcattattgggatcaatccgaactggttgacgaaacctgtgctaggagagatttttaaggatgtcgtaaatatttcaagaagtgcaagggcatatggtagtgcagcgcttgaaattgtttctgtcgctaccggtaatttagaagcatatatgacacctagactccaaccgtgggattttgctggaggactagtcattttaaatgagttggacggtcaagcttctaatttattaggtgaaccgctaacaattggtggtccaaactcagttttagttggtaatcgtggtgttcatagagagatcctcgatgtatatttagagccacatcgcgatgcgttaatacaattacatgaacaacgatttaaaagaaaatcaaaataattaccaaaagcgtaatatgtagtcctaacaattaggtaacatattacgcttttatatcttaaataataaaaacacgcgccaatataaaaccatttaaatgttcatcatgaacatgtgtggtctttaatcaacgcgtgttattgtcgatataacttatagccaatcgttttctcgatattttttctttgtagtaaatccaattccaaaggttgcaacgagtaatataaatgttaaaatcatcattggtacatttgatgcaccaacagcaaaactaaataatattaagaaaataacagctaatatagaaaatacccaaaagatatttttagattttttttgtttcatcctatccccaccttttgcttatcttttctcaattatatgatataataaaaaagttgtaattaaaagtgggattttacttaagaaagaaggaaactatttatatgactaataaaagagaagatgtccgcaatatagcaattattgctcacgttgaccatggtaaaacaactttagtagatgagttgttaaaacaatctggtatattcagagaaaatgaacatgtcgatgaacgtgcaatggactctaacgatatcgaaagagagcgtggaattacgattctagccaaaaatacggctgttgattataaaggtacacgtatcaatattttggatacaccaggacatgcagactttggtggagaagtagaacgtattatgaaaatggttgatggggttgtcttagtagtagatgcgtatgaaggtacaatgcctcaaacacgttttgtacttaaaaaagcgctagaacaaaacctaaaacctgttgttgttgttaataaaattgataaaccatcagcacgtccagagggtgttgtagatgaagttttagatttgtttattgaattagaagcaaacgatgaacaattagaattccctgttgtttatgcttcagcagtaaatggtacagctagcttagatcctgataaacaagatgataatttacaatcattatatgaaacaattattgattatgtaccagctccaattaataacagtgatgagccattacaattccaagtagcattgttggactacaatgattatgttggacgtattggtattggtcgtgtattcagaggtaaaatgcgtgtcggagataatgtatcactaattaaattagacggtacagtgaaaaacttccgtgtaactaaaatctttggttactttggattaaaacgtttagaaattgaagaagcacaagctggagatttaattgctgtttcaggtatggaagacattaatgttggtgaaactgtaacaccacatgaccatcaagaagcattgccagttctacgtattgatgagcctactcttgaaatgacatttaaagttaacaattcaccatttgctggccgtgaaggtgactttgtaacagcgcgacaaattcaagaacgtttaaaccaacaattagaaacagatgtatctttgaaagtttctaacacagattctccagatacatgggtagttgctggtcgaggtgaattgcatttatcaatccttattgaaaatatgcgtcgtgaaggttatgaattacaagtttcaaaaccacaagtaattattaaagaaattgatggtgtaatgtgtgaaccatttgaacgtgtgcaatgtgaagtgccacaagaaaatgcaggtgcggttattgaatcattaggtgcacgtaaaggtgaaatggttgatatgactacaactgataatggacttacacgtttaatctttaatgtaccggctcgtggtatgattggttatacgactgaatttatgtcaatgacaagaggttacggtattattaaccatacatttgaagaatttagaccacgtattaaagcacaaattggcggacgtcgtaatggtgcattaatttcaatggatcaaggttctgcaagtacttatgccattttaggacttgaagatagaggtgtaaacttcatggaacctggtactgaagtttatgaaggtatgattgttggtgaacataatcgtgaaaatgatttaactgttaacatcactaaaacaaaacatcaaactaacgtacgttctgcaacgaaagaccaaacacaaacaatgaatagaccgcgtattctaacattggaagaagcattacaattcattaatgatgatgaacttgttgaggttacaccagaaagcatacgtttaagaaagaaaattttaaacaaaaatgttcgtgaaaaagaagcaaagcgtatcaaacaaatgatgcaagaaaacgaataatttaacataataaaagagaagctgagcgatgaaagttgcttagcttctcttttggcatataatatttgaaaaagtgtttaaatgctatcagttcctgttactttcacattttcaaatttctaacttgtttattcagatattaatcgagcggatagtgttgcgcacgttgtttaggggtgtctaatcgacttttacaatcatcgcacataaatgttcgaataggattgtttttaagtcgtttagactcagttgtgcgctcatctataaatacttttgcatcacagataatgcattgcacttgtctcaaattaaatcacctcaatatgagttacatggttgattcgatttgaataaccatcttcttgattgtaaataaaactatctacaccattatcgctgtaaagtcgtttaccgtcttttgcaaattggaaaaataaatagggtaatagatctatcggtatatctaaatgatcatgctcatttgataatcgaatagtagttgcagagtcatgtggttcggaatgtttgaaaaatggtgtcatattaatgacaaatgaaccttctaacatggcacgttttttgtattttatttctgaatttaaagtaggcggattagtttgtccttctaggatagcacgattccattcatgattatcttcaaagtcgattggttttgaaccatcaaatacacctttttctaaatcttcgatgctaacttttctatcatcgaaaatccaagtcgtactatctaatgttataggaaactttacggctcctttaatttgtatcattttcccactccctatcaatgtatatagcattattttaacacaaattgctaacgacacattttaaatctacttgctttttaatatttagtaagataaacttttagtaagacttgagaatttatatagagggggagcgtgtcatggcgaaacaaacaacaatgaaaaatgcagctttgaaacaattgactaaagatgctgatgaaatcttgcatctgattaaagttcaactagataatttaacattaccttcatgcccattatatgaagaggtactagatacacaaatgtttggacttcaaaaagaagttgattttgctgttaaattaggtttagttgaccgcgaagatggcaaacaaattatgttacgtcttgagaaagaactttcaaaattacatgaagcttttacacttgtttaaggtttaatatataagcatattaaaacggcgtgagatatcgacaattgagctgcgccgattttatatttatagtttaattactgattaaagtggctgttatgttgtcttcttgatgacatgtcagtcacttttattgggttttagcaattcacgatattaagtaaacaaatattctataaattacctcaagatacctgttaatatttgtgattatgacgatgtcatgtatataataagtaacatggatttttaaaattaaagtataaaacgaaatcatttgaagtataaattgtagaattggatgactgaatatatgaagaattttagaagtattttacggtatattggtaaaacctcaaagtttattgattatccgttattagttacatatattgtattgagtttaattggattagtgatggtatatagtgccagtatggttccagcaactaaaggtacattgactggtggtatcgatgttccaggaacgtatttttacaaccgacaattagcatatgtcataatgagttttataattgtattttttattgcatttttaatgaatgttaaattactgagtaatattaaagtgcaaaaaggtatgattataactatcgtctcgctattattactgacgttagtaatcggtaaagatattaatggttctaaaagttggataaacttagggtttatgaacttacaggcatctgagttattaaaaattgcaatcatattatatatcccatttatgatcagtaaaaaaatgcctagagtattaagtaaaccaaaattaattttaagtcctattgtattagcattaggttgtacgtttttagttttcttacaaaaggacgtagggcaaacattactaatattaattattttagttgcgattattttttattcaggaattggggtaaacaaagtcctgagatttggtataccagcagtgctaggattcttagtagtatttgtcattgcattaatggctggttggttaccaagttatttaactgccagatttagtacgctaacagatccattccaattcgaatcaggaactggataccatatttccaattcattgcttgcgataggtaacggtggcgtatttggtaaaggattaggaaatagtgcaatgaaattgggctatttaccagaaccacatacagattttatttttgcaattatttgcgaagaattaggtttaatcggagggttgctagttattactttagagttctttattgtatatcgtgccttccagtttgcaaataaaacatcatcatatttttataaacttgtgtgtgttgggattgccacatactttggaagccaaacgtttgtaaacattggcggtatttcggcaacaattccattaactggtgtgccattgccatttatcagctttggtggatcatcaatgattagtttaagtattgctatgggattacttctgattgtaggtaaacaaatcaaagtagaccagcaacgaaagaaacaacagcaaaaagttgatataagaagacaatttaattaaaaaaatactagccaatatttagtacgagatgacttctgtcattaagcaatgctaaacattggctatttatatactctttgtcaaattggactgatgagttcaataacggaagttaggcaaccaaacaacgcttaacttcctttttgttttgttattacgagattactcatgattatcaaattttataaacaaaacaacgtataattataactaaattttatgactaaaaatcactaaatgtggtggcgaaattagaatcatgatgataagataaagttatcgctattgataataaatgttgatgttttacaattttatttttaattttttagagttgtagaaatcgaaaatgtttcacaacaaaaacgtgaactatctgttgttgcataatcatttttgaaattattatttttgaagcggaggttttaattgtctcaagaatgttaaattttgaaaatttgaaacataactatagcaaaacagagcgctttaagataaaattttattatctaattagttagaaaattctaatagtttgaggagtgtatcgctattgaaacaaataaaaaagttacttgttgctaaccgtggagaaattgcaattcgtatattcagagcggcagcagaattagacatcagcacagttgcaatttattcgaatgaagacaaaagttcattacatagatataaagcagatgaatcctatttagttggaagtgatttaggtcctgctgaaagttatttaaatattgagcgtatcattgatgtagcaaaacaagcgaatgtggatgcgattcatcctggctatggatttttaagtgaaaatgaacaatttgcgcgtcgttgtgcagaagaaggaattaaatttattggtcctcatttagaacatttagatatgtttggagataaagttaaagctcgtacaacggctatcaaggcagatttaccagttattcctggtacagacggtccaattaaatcatatgaattagcaaaagaatttgcagaagaagctggtttcccgctaatgattaaagccacaagtggtggcggcggtaaaggtatgagaatcgttcgtgaagaaagtgaattagaagatgctttccatagagcaaaatcagaagcagaaaaatcatttggtaatagtgaagtttacatagaaagatacattgataatccaaagcatattgaagtacaagtcataggtgacgaacatggaaatatcgtacatctatttgaacgtgattgttcagtacaacgtcgtcatcaaaaagttgtagaagttgcaccatcagttggattatcaccaacattacgtcaacgtatttgtgatgctgcaattcaattgatggaaaatattaaatatgtcaatgcaggtactgttgagtttctagtatctggtgacgaattcttctttatagaagttaaccctcgtgtacaagtagagcatacaattacagagatggtaacaggaattgatattgttaagacacaaattttagttgcagcaggtgccgatttatttggtgaagagattaatatgccgcaacaaaaagatattacaacattgggctatgccatccaatgtcgtattacaacagaagatccgttaaatgatttcatgccggatactggaacaatcattgcttatcgttcaagcggtggctttggtgtacgtcttgatgctggagatggtttccaaggtgctgagatatcaccttattatgattcattactcgtaaaattatctacacatgcgatatcatttaaacaagcagaagaaaaaatggtacgttcattacgagaaatgcgtattcgtggtgttaaaactaatattccattcttaattaatgtaatgaagaataaaaagttcacaagtggtgattacacaactaaatttattgaagaaacaccagaacttttcgacattcagccgtctctagatagaggtactaaaacattagaatatataggtaatgtaacaattaatggtttcccaaatgttgagaaacgtccgaaaccagactatgaattagcatcaattccaactgtatcttcaagtaaaatcgcttcatttagtggtacgaaacaattgcttgatgaagtaggtccaaaaggtgtagctgaatgggttaaaaagcaggatgatgtcttactaacagatacaacttttagagatgcacaccaatcattattagctacacgagttagaactaaggatatgattaatatcgcatccaaaacagcggacgtatttaaagatggtttctcactagaaatgtggggcggtgctacatttgatgtggcatataatttcttgaaggaaaacccatgggaacgacttgaacgtctacgtaaagctatcccaaatgtattattccaaatgttgttacgtgcttcaaacgcagttggttataaaaactatcctgataatgttattcgtaaattcgtacaagaaagtgctaaagcaggcatagatgtctttagaattttcgattcattaaactgggtagatcaaatgaaagttgccaatgaagcagtacaagaagcgggcaaaatctcagaaggtactatttgttatacaggtgacattttaaatcctgagcgatcaaacatttatactttagagtattatgtcaaactagctaaagagttagaacgtgaaggtttccatattttagcgattaaagatatggcaggcttattaaaacctaaagctgcttacgaattgattggtgagttaaaagcagctgtagatttaccaatccatcttcacactcatgatacaagtggtaatggtttattaacgtacaaacaagcaatagatgctggtgtcgatatcattgatactgctgttgcttcaatgagtggtttaacaagtcagccaagcgccaattcgttatattatgcattaaatggcttcccacgtcaccttagaactgatattgaaggtatggagtcacttagtcattattggtcaactgtacgtacttattattcagactttgaaagtgatatcaaatcaccgaatactgaaatttatcaacatgaaatgcctggtggacagtattcgaatttaagtcaacaagctaaaagtttaggtttaggcgaaagatttgatgaagtcaaagatatgtatcgcagagtgaacttcttatttggtgatatcgtaaaagtaacgccatcgtctaaagtagttggtgatatggcactttatatggttcaaaatgatcttgatgaacaatccgtgattacagatggatataaattagatttcccagaatcagtagtgtcgttcttcaaaggtgaaataggacaacctgtaaatggttttaataaagatttacaagcggttattttaaaaggccaagaagcattaacagcccgtccaggtgaatatctagagccagttgattttgaaaaagtccgtgagttgcttgaagaagagcaacaaggtcctgttacggagcaagatattattagttatgtattatatccaaaagtatatgaacaatatattcaaactagaaatcaatacggaaacttatcgttacttgatacgcctacattcttctttggaatgcgtaatggtgaaacagtagaaatcgaaatcgataaaggtaaacgattaattattaaactagaaacgattagtgaaccagatgaaaatggtaatagaacgatttactatgcgatgaatggtcaagcgagacgtatttatattaaagatgaaaatgtgcatacaaatgcgaacgttaagccaaaagcagataaaagtaatccaagtcatatcggtgcgcaaatgccaggttcagtaactgaagtcaaggttagtgtaggtgaaactgtgaaagctaatcagccgttgctaattactgaagctatgaaaatggaaacaacaattcaagcaccatttgacggtgtgattaaacaagtaactgtaaataatggtgacacaatagcgacaggcgatttattaatcgaaattgaaaaagcaactgactagaatgattaaaataaaacgagattacacaacaattgacgtgtaatctcgtttttacttgtcttaggtttaattttaaatattgatataaaaaaccgtaattttaatgggcgtgccattaaaattacggtttgcttttttgttattgcttgtcacttcttactgatcgtaacattagcatgataaagtatgttgtcataccaaataaataagtgataaataatgcatggaatagtgcgattatcaagttaacatttgtcataatagacaatgcacctgtgataacttgtaatataacaagtataaatgcagctgtataaccataatgaacagtacggttatttggataatttttaacagcgtgaatataagtaatcataataatcgtaaacactataaaagccatgatacgatgcgtgagttgaacccaatcttgttctgaatgtggtacaagatcgtggaatggcaatggccaaccaccatatgctaaacttgcatccgcatgtctcactagtgcaccagtgtaaacaccacaataaatgatgattgccattaaccatgttaaacgtcttaatggctttttgatatataattcgtcagcttcatatttttgatctatagagaaaataattaatgttattaaaaatacagatgagaaactgattaatgatataccaaagtgcaatgctaaaacgtaatcgttttgttgccaaataacagcagcagctccgattaatgcttgcaataataagaatccaacactaatgattgataaaggtttaatttctttaatatagcctatatgtttccatacagtgataactaaccataagaccattaataaagacaaagctgaaacggctctatgacttaactcaataatcgtatcaataggaaagaattctggaatcaacgcaccatgacatagtggccaagaagaaccacaaccatcagctgatccggttttggtaactaaggcaccaccaagttgtacaaatgtcatcattaacgttgctacgacacctaaccattttaaattctttttgccaaacaatttatacaccccatcataaaaaaacgcatcactgagaattagaattaatagccggatttgagatgatactataaattgacctgattgtaggatatgaaaagatgggatccaacgcaggaaatatgatttaattttacaagtattgtaagtggacgacataaaaagaccttaatcgtaatgatttttttattgagataattatgtaatccacgtttactcaaatttgaagcttaaaaattaatctcttttagatgcatgattctacttattaaaattttctaacatatacattatagcaataaattaaatgttatttgtgtcacaaaattgacattttctcttgtcgttaatttgtcacaatttaattttattaaacctagtctttttatgcaatctaagatatcataatcttatatgaacaaatttaaggagggggattatgagcaaagagcatactttgtcacaaaatattagcagagttaacttcaaagaattgcaacagataattaaaatgggacttgttcaaggtaacttaattccggcttttgcgggcgcatggctagcagttgtaatgacaaatcattccttcttatcatcaatacctcaaattttattaatgctattaggatctactttaattatgggtggcgcatgtgcgttaaataattattacgaccaagatattgatcgtattatgcctagtaaacaaaatagaccaactgtaaataatagaattacagatcaaaatttattattattaagttttggtatgatgttagttggagaaatttgtttgtttttattgaatataccatcaggcgtacttggtcttatggggattgtaggttatgtgtcttattactcaatatggtctaaaagacatacaacatggaacacagtgattgggagttttcctggagcagtaccaccactaattgggtgggttgcaattgaaggacaaattagtttaacagcgattgcgctgtttttagttgtattttgttggcaaccaattcatttttatgccttagctattaaacgtaaagatgaatatgcacttgcaaatattccaatgttaccatcagttaagggctttaaacgtacacgtgtcagtatgtttatctggttgattattttattgccagtacctttattactaataaatttaggtgtcgtattcgtagtgttagctacattattaaatttaggatggattgcattaggtttaacaacatttaagaaaaattcagatcaaacaaaatgggcaacacaaatgtttatatattcactaaattatttagtgatctttttcgtgttagctgtgattgtttcattacttactttgatctagattaattaagttaggatgaaaaatatgggcgttccaattttaccaacgattagtacgacatgtattgtcattagtgcaattttaattgccattggttggagacttatttggaaaagggaaataaataaacacaaaaatgttatgttagctgcagctgtttttgctttaacttttttcttaatctatgcaagtagaacgatttttatcggtaatacagcatttggcggaccagcatcaattaagaaatattatacgattttcttatttttccacattaatttagcaacaattggtggtattctaggtctagttcaaattattactgcatttaaagataaatataatgtacaccgcaaattcgggccattcgcttcagttatatggttctgtactgcaattacaggtgtagcagtttacttattattatatgtattatatccaggtggagaaacaacatcactgattaaagcaacatttggtcattaatacgcttatacaaatgatactaatctgataaggctatttgttttatcaggttttttgttgaagaatagtcggacagttgatggtattcatttgataccttaactgtccgtttttttatacatattttaatcctaataatgaaattcaacctgaaaacataaaggtaggtcatgatatagagtgtagggaaaatctttatgatgttaacattatgcctgaaaatgattttgtttcatcgaaatgacacagttatgtcagtattgaaaatttgctaattaatgtgttgttttttacaatagtattaatactttttaggtggttgattgatgaaaaagttaattataagagtcgtcggtgtattatttttagttggatttttaatatatcttttttattcaccgagattaaaatttgatgtattagagaacccgaataaaggtaataaagtaaatagatctgaacaggtgaataaatcaaataaccatgctgaaaatccaaagcctaaagaaggtgttggtacatgggtaggtaaagatattaaagtgcttacttctaaatttggacaagcagatcgtgtctatccttttagagatggttacaaaaattatgtgtttaaagacaaaaacagttattacattgtttcaactaaacgtgaagaaatcgtttcagtgtatgctacaggtgaaaaagtaaatgttagtccgttaaaaataggacaacattctgcagaaatttttaatcatacaagtattaatccagaaccgtcctttaaagtagatggtaaaaaatatgaatttgaactttcagatgaagatttaaaaacacaaacactgattaaatatggcaacatatatgcacaagtgtattctgatcaacaatcgaaaaaggtgctaagtgtacgatttttaacaaaagaaatgttagcagatattgaaccttatcaattaaattctaattttacgtcagaagagcataataagcatccagttgagcaaaatccaaatcaattaatttctctttatgaagtaacgaatgaaatgagaaaattaaaaggattaaaaccattgaaaatcaatagcgatttagcacatattgcatctaataacttatatgaagcgacctctaatggttctgatagtgttgaatttacagaggatgcattaagagggcaattagataaaaatcacgttacttataaaacaactgctcaaaatgttggttatgcgtttaatgatgtaccaacattaatccatagttggatgaattcagatatacatcgatctcgtctattaaattcaaaatacgatgagatgggtggagatgtaatgagagattattattcactaattttcttagaaaaataacaatgaggggtatttatgattaatgaagcttcactagcgatattagatgatattgatgaactagctgatatgatagttgcatcagatatttatgcatcatttgagcaagctaaacaggcgctcgaaaacaatgacgaagcacatttactttatcaatcatttttaaaatcaaaagagaaatatgatgaagtaatgcgtttcgggaaatatcatcctgattataagaaagtcatgttagagacaagacaacgcaaaagagcatatgagatgcttgacgttgtgatgcattacaaagctagggaaatggcacttcaacatttaattgatgaagttgttacgaaaattgcgtacgctgtttcagaacatgtcaaaatagaaacaggtaatccattctttcaaacatcacatagtggttgtgcgacgggcggatcctgtaattgttcattataaaaaacatcgagtcagaaaaagatggttattgaaaccattaattagcatctgactcgatgtttttatttattgtttattgtttattgtttattgtttattgtttgtttgaattgttgtgctaaatctggtcgatctgtcacaatcgtgtgtgcacctttttggtataaatcattcatcagatctatactatttacgccataatagcctggaatgacattcatatcatttaaccatttgataaaacgagatgaagtcaaatcaatgcctttaaaatgagtaggcatttggaacgtttgtgctaatggttggtagtacctgccacctaataaatgatattttaaaaatgcctctgtaacttcctgttggctagcaccaattgcaacagatccttgtgcaattttattaaaacgtacgatttgttctttataaaaacttgtcacaagaacacggtcaaatgcttgattttctgcaattgtatcaaacataatttgtggtgcgattgagccttcataggattcaggagcatcttttaagtctacgtttatatacatatcaggatattgcttcagcaactcatcgaaggttagtatagctgtgtgtgcatgaccacgatatggtgttagtccattgatatctttgaagtgataagctgcgtctaatttctttaattctgccaatgtatgggcactaacttttccagagccgttcgtcgttctatcgacagttgcgtcatgaaaaacgataagctgttgatcttttgtgagtctcacatctgtttcaaagccatcaacgcctaattgtttagcatagtcaaatgcaagttgcgtttgctctggtcttaaagccataccaccacgatgcgcaaaaacatatggtgcattgcctttgaaaaaagcagggatggtttgctttttagtaatcactttatttttatttatcattaacaaactacttacaaatccagcaccgactagtaccgcatttaaaatgtttctgtttacttttttcataaaaaattcctcctcgtttacttttatagcttaacaaattcatagttctgactacagcgaaatgtgtggttaatcatatagtgatgcttttgagaattgaattaatataatgatgtttaatataatctaaatacatttatcgagcaattacataagacataattaaggtagcttaatattttaaaattaataaagacatgatatgattaatgctgaaaataaatggagtgaggtttaaatgaatttaatcccaagaactagtattgtagtttatttaaaacatatgaaacatgaacgacaaatccgaaaatatggacatatcgttcattcaaatagagatcgcaaatttgtaattatgtatgtgaatgagcaagatgttgatcaaattgtacataaactaatgcaacttaaatacgttagacacattgatggctcaccatataaatacttaaagaaaacttacgaaaaagagaaacacgaaatatataattaatattattgaagttctggtatccatttttggagccttaacacactaattaaataattataatataacgataaatcatgaaatgcttgagggggctgtacatcgatacctaaaataggtatgtcgaatttttcagcacaatcattaatcatttgaaactttttatttgaatctggatatggatatttaatagcgttaatcatgatataaaatgcttggaaatgattgccagttgtagggttcataatgattgctacagatgactttttattttcagcttgtggtgaatgaaaatagataattttatcaatacgttgatggttatattcaatcatcgtcatgaattcgaacaaatctgttagaccttcaccaagtgtaataaatgtttgtttcattggtttatcattctcctttttctcaataaattatattaaataactaaatgaattggaagtgtgaacaacatgcgcgtcattgcaggtaaacataaaagtaaagctttagaaagtatggaaggccgtaatacgagaccaactatggataaagttaaagaaggtatctttaatagtttatatgatgtgtcaggtataggtttagatttatttgcaggaagcggggcgcttggaatagaagcactctctcgaggtatggataaggttatctttgttgatcaaaattttaaagctgtaaaagttattaaatcaaatctttcgaatttggatttagaggcacaatctgaagtttataaaaataatgcagatagagctttaaaagcattgtcaaaacgtgatattcaatttgatgtcattttcttagatccaccttataataaaggtctcattgataaagctttaaaactaatttcagagtttaatttattgaaagaaaatggtatcatcgtttgtgaatttagcaatcatgaagaaatagactttcaaccgtttaatatgattaaacgttaccattatgggttgacagacacattgttattagaaaagggagaatagcatggaacatacaatagcggtcattccgggtagttttgaccccattacttatggtcatttagacattattgagagaagtacagatagatttgatgaaattcatgtctgtgttcttaaaaatagtaaaaaagaaggtacgtttagtttagaagagcgtatggatttaatcgaacaatctgttaaacatttacctaatgtcaaggttcatcaatttagtggtttactagtcgattattgtgaacaagtaggagctaaaacaatcatacgtggtttaagagcagtcagtgattttgaatatgaattacgcttaacttcaatgaataaaaagttaaacaatgaaattgaaacgttatatatgatgtctagtactaattattcgtttataagttcaagtattgttaaagaagttgcagcttatcgagcagatatttctgaattcgttccaccttatgttgaaaaggcattgaagaagaaatttaagtaataaaaataacagtattttaggtttatcatggtttacaatcctaaaatactgttttcatttgttaacgatattgctgtatgacaggcgtgttgaaatctgtttgttgttgcccgcttattgcattgtatatgtgtgttgctttgatttcatttgtgaagtaatgtgcattgcttttgttaatattggttatatattgtctttctgggaacgctgtttttaattgctttaaatattgtctgccacggtcgttcatcgctaatactttaactgcgtgaatgtttctcgtaacatctgtaggtttaatgtttaataatacattcattaacagtctttggatatgcgtatatgtataacgctttgtttttagtgattttacaaaatgatgaaaatcagttgcttcattaatgttagattttaaacgattttcaaaaccttcagtaacagtataaatattctttaatgactctgtagtcatagctatgatttgatatttcaaatatggaaatatttgatttaatgttatatgaggtgttacgtacagttgctgaatatctttaggtaccacatgatgccaatgatcatcttgactaatgattgatgttctaatagatgtaccacttgcaaactgatggtgttgaattaatgaatcatgatgttgagcattttctcgtttaatagaaattgcattgatgtttttagcatgtttagcaattgctttcagataactaataccaagtatgttgttaggacttgctagtgcttcatgatgctctaataattcgctaatgatacgagggtagcttttaccttcttttactttttgtgaaaaggattcggattgttcaatttcattaatgctgtgagctaattgctttaatgttttgatatcattattttcactaccaaatgcaattgtatcgacactcatataatctgcgactttaactgctagttcggcaaaatgatcgccagatgataaactggcagttgctggtagttcgataactaaatcagctgttgataatgccatttttgcacgagtaaacttattatagattgctggttcgccacgcatgacaaagttaccactcattattgcaatagtaatgtcagcatttgtaagttttttagattgattaatatgatattgatgcccattatgaaagggattatattctgtgattaagccaacgcttttcatttgcaattcgtcctttcggtattcattattaatattgtaacagaacatgatatgttaagaaaaaatcttgacaacttgttcttagaaagttaaaataaattttgtgcttgttagaggtgaagccatatgaaatggtcaattacgcaattaaggaaatatcaaggtaagccatttgaatttgatcaaacggtgagttttgacaatttaaaagaatcattagatttaattgatttatctccaattacaatccaaggtcagttaaccattaagtcaacagaagtcgttgcggatattcacattactggtacctatacaatgccttgtgcacgtactcttgtaccagttaaagtcccactagatgtaactactacagaagtatttgatttagaagggtacaatcagtataacgatgatcaagatgatgtagatgaacactatcacattattaaagatggtatggttaatcttcatgatattgtcgaggatatagttattattgagaaaccaatgagagcttattcagagcaaagtgaccaaatgttgacagtaggtaatggttgggaagtaatcgatgaggatcaattagatgagcttgctaaacagcaagaacaagatgattcagaatcacgacaagttgatccaaggcttcaaaaattacaacaattatatgataaagagcaataagtagtttaattaatgatataatgttgttaattaaactaacatttagtatttttcgtttataatctaaggaggatatatcatggcagtaccaaaaagaagaacttctaaaactagaaaaaacaaacgtcgtacgcatttcaaaatttcagtaccaggtatgactgaatgcccaaactgtggcgaatacaaattatcacaccgtgtatgtaaaaactgtggttcttacaatggcgaagaagtagcagctaaataattttagttactcaatataaaaagtcccgcttaaaatgattgttttaagtgggactttttatattgcaaaaaataattggcggacgaggtaacaggttacctcatccaccaattaaaatttgttaatttaagaattaaatataaagacgattaattagtttttacgttttctaggtaatacgaatgcaatgatgctacttaaagctaataatgccattaatggtaatgtcatatccttatttgattcttcaccagtttgtggtaatgattttgctttattttcttgtgtatttttattgttttcgctttgagtgtgtccatcatttgtgtttttaatgtttgctttttgtaatggagcactatcttttgcttcgctagaacctgctgaagtttgaacaacatcttttgttgtttctgatgaagcagttgttggttttgcaacattttgagtcgtagatactaccttagttggagttgtactacttgattctacttcagctttagctggttttgtagcaggcgttttgtctttacctgactcactagatgcgtcattttctttttcaacacttggtgattgtgtattgtcatctttttggctgtcttgtttttgtgattctttttcaacaggtgatggtgttggtttgctaggcttagctggagtaatttccttcttagctgagttatcttgttgttcttttttgttagatttatcggcattggcttttgtaaatgcttctttatcaacgattcttacatggtattgtccatcataatcaatagtttttacatgaactttaacgattgcatcatatagagttttaccttcaacatatgggaaaataatcgttctagtgttatttttagcatctttgctaattgttctaacacgttgaccttcaaccatgaaatctttccagtaatcgtcattagtagtttccattaccatatattttttgccgttaagcatacctgttttaatagggtgtttaacaaaagtatccatcatagattcgttattctcaacactttcataaacaacatattttgtatcttgtaaatcagtcattttttcatttgttggttgtacattttggaattcagttattgcggatttcacttgttcatctaaagcttttttcgtctcttctaatttcttcttgtattcagctttcaatttttcaggaagtttatcttgaattttatttaattcataaacttgtctttctagtgttttcgcttttttatatggcgctaataatttttcagctttataatcttcttcagttttgaatttatctgcactgttataaattggttgtgcgaattccattaatgtgtaatcgtatttttcttctttgttattgaagtgagttgaacttacaattttaacggcttttgttccatttgaaacagagaagcgaatgtaagcataatctttaacagtatcgtatgatactaatttaattggtaactttttgtcaccttcataaacttcaaattttctccaaaattgacctgattgtaaacctaattctatttctggttttgaatcagtgaaaataactctagctggtttaacagagcttgcataatgataaaattgttgctcaccgttttcttttttcatttcaaaatcaattggacgagagtttggtgcgctatgatctttatcttttattgcagggtttttaatcgcttctcttagttcctgatttaaaataggatatgtattgttatcggcttttgctgctggtttaacttcttttgtttccttaggggctttaacttctttagcttcttttgtttcagaagtaggggcctcaacttctttattagatactgagacagcattggctactggtttagcttctggagctttttcagttgttgttgatggacttgcaactgcttcagtttttggttgtgcttctgtatttgtaccacctgtttcttcagctgcttgtgcttcgccatttgacattaataataaaagtgtactaatcgctacagatgcaacgcctaatgatgactttctaattgaataaaatgatttaaattctttttgctgtttgttcatgttgttgaaacaactcctaattgtatattatcaactgataatcattatcaattgattacttgtattgtacattgaaatggtagttaattgcaacgttattttataaaaaaataacctatgttatagattatggaatatctataacataggttgaataaaatttaaaataaaaaatatattaagttatgagtgtgacgatgatttatttagattcttttcttttgaaaagtaacaaagataatgaacctaaaagggcaagtgttgcgaaggcaactgtgctaataaagttatcaactgaagttaaaccagtttttggtaattctttagctttagatgcttgtttaggcgtttcgttttgttttgtaactttgttagtttgttgtgatttattgtcacttacagcttgattgttgctttcagatttcgctgttgcaacatctttaacaggagtttgaactttattttgttcttgagctgtttgtgctgttttaactgtatgagcagtttgtgttttagtttgatcttttgttgtatcagtacttacaactttagtagagtgattgtcttcaactttgcttgttgtagttacagtaggtttaactttttcaactttaggttgaactggtttagtttgctcagtaggtgttttaggttgagcaggttttggttgaaccggtttaacattgtttggttttgctgcgtcagctaatgtaggaattgctttttcaaattctaaatgcgtagtatatctatgattgtaattaatttgtggcacgacaatatgtactttagtagttaaactcttatacccaggttcaacagcaacattgattgttctagtgtcagcttttttatcatcgttaacaacagttgttgctaattcttgattgtttgcattgtaaaatttgtattctttccagaatgatgcgttgtttaatacagcttggaaataatatttattattttgtttaattactttaccagggtgttgcatatagtcatccatgtgtgacttctctgaagagccatctttttgcacttggaaattaattggttgtgatgttgcttgagaaacttgtgcgttttgattattagttgcgttcgtagcttctgttgccgcatttacttgttggctgtctgcgcctatgtatacaagggaacctaaaatgatagatgctgtacccattgtaatctttttcatagctgatgaacgttgttctgattgatacttactgtttaaataatgttttgtcatgttgttttcctcctaaggatacaaattatgtgttgttatatgagatgattaaccattgcaattgataatggttatcaattatactagcacatctattttcgtataacaataataaattgattataaaataaatattgacaatgataatcattattatttatgatttcagtaaagacttaaaagcaatcataaaaaggaggattatgttttgaaaaatattttaaaagtttttaatacaacgattttagcattaattatcatcatcgcgacattcagtaattctgcaaatgccgcggatagcggcactttgaattatgaggtttacaaatacaataccaatgacacgtcgattgctaatgactattttaataaaccggcaaagtacattaagaaaaatggtaaattgtatgttcaaataactgtaaaccacagtcattggattacaggaatgagtatagaagggcataaagaaaaaattattagtaaaaatactgccaaagatgaacgaacttctgaatttgaagtaagtaagctaaacggtaaaatagatgggaaaattgatgtttatatcgatgaaaaagtaaatggtaagccattcaaatatgaccatcattacaatattacatataaatttaatggaccaactgatgtagcaggtgctaatgcaccaggtaaagatgataaaaattctgcttcaggtagtgacaaaggatctgatggagcgactactggtcaaagtgaatctaacagttcgaataaagacaaagtagaaaatccacaaacaaatgctggtacacctgcatatatatatgcaataccagttgcatccttagcattattaatcgcaatcacattgtttgttagaaaaaaatctaaaggcaatgtggaataatgagaaatgttaaacaaattgctacaaaatctattatagctattattagcttaggtatacttacatatacaacaatgattggtagcgtgttggctgatgagataaaatatccatcagccaaatttaatcaacctgaagcaaaagataaaacagaattaacttcatcaatttttaatgaaaagataaaagagaataaagcgttagagttactaatttttaatcaagaaaataaaaatgtaactgaggaacaacaactagttgacgaaaaggcgcaattgatttcagatatgactggtaaaatttacttacaagtaaagctaaaaggtcaaattgataaagaacaacttgtttttcaaaatgacaaaaatgaagaatttcctttttttataaaagatgaaaaggatgacacaatagtaagaattttaattgaacagcatatggataaaatcaatatgcatgttaaaacgttggctgaaaagaaagatctagataacaaagaaatggtgtattctattcattttaaagagaaaaaagtacaacatgatgatgcaaaagaagtgccttcaaaacatcaaaatcaagaaaataatcaagatcagcttaaaaaagatattgatgacaaaaaagatagtcaaaaatcagacattaaggaaagacgtactagcctttttactgaaaaaggattaaatgatattcctgtacaaaaagataaagtgcaacaagacagtaataaaaagattgaaaatgagcgacctaaagcatcaggtacattaaaagttgaaaatagccctccaacagtaaaaaaggttgaaaataatcacaaagagcaaccgaaacataaagatgaaaaatcaaaaaaggaaaagaaaaaagtagttgaaaaagaaaaagcgttaccagcttttaatagagatgatgatagcaagaatagtagtcaattatctagtgatattaaagaacttgatgaaccaaatcataaaaagcaatatatgttatttgcagctggcattgtgttagcaaccattttacttatttcggcacatttatacagcagaaagagaggtaaccaagtttgagaatcataaagtatttaaccattttagtgataagcgtcgttatcttaaccagctgtcaatcttccagttctcaacaatcaactaaatccggcgaattcagaatcgtaccaacaactgttgcattgacaatgacattggacaaattggatttaccaattgtcggcaaacccacgtcatataagacattgcctaatcgttataaagatgtaccggaaattggtcaaccaatggagccgaatgttgaagctgttaaaaagttaaaaccaacacatgttttgagtgtgtcaacgattaaagatgaaatgcaaccattttacaaacaattaaatatgaaaggctacttttacgattttgatagtttaaaagggatgcaaaagtcgattacacaattaggtgatcaatttaatcgtaaagcacaagcaaaagaattaaatgatcatttaaattctgtaaagcaaaaaattgaaaataaagcagctaaacaaaagaaacatcccaaagtattaatattaatgggtgtaccgggtagctatttagtagcaactgataaatcatatattggtgatttagttaaaatagcaggtggagaaaatgttattaaagtgaaagatcgtcaatatatttcgtctaatactgaaaatttgttgaatatcaatccagatattattttacgattaccacacggaatgcctgaagaagttaagaaaatgtttcaaaaagaatttaaacaaaatgatatttggaaacattttaaagctgtgaaaaataatcatgtttatgacttagaggaagtgccattcggtattacagcaaatgttgatgctgataaggcaatgactcaattatatgatttattttataaggataaaaaatagtgagttgatatgatgataaaaaataacaagaaactactatttttatgtttgttagtcattttaatcgcaacagcttatatttcgtttgtaaccggtacaattaaattgtcatttaatgacctaattacaaaatttacaactggtagcaatgaagcagtggattcaatcattgatttgcgattgccacgtatattaattgcattgatggttggcgcaatgttagcagtttctggagcattattacaagcagcactacaaaatcctttggcagaggcgaatatcattggcgtttcatcaggtgcacttataatgagagcactttgtatgttgtttattccacaattgtacttttacttaccattatttagttttattggtggtttaataccatttttaataattatattgttgcattctaaatttagattcaatgctgtaagtatgatattagtaggcgttgcgttattcgtattattaaatggtgttttagaaattttaactcaaaaccctttaatgaaaattcctcaaggcttaacaatgaaaatatggagcgacgtatacatattagcagtatcagcattattgggatttatattaacattactattgtcccctaaattgaatttactaaatttagatgacgtacaagcgcgaagtatcggttttaatattgatcgttacagatggttaacaggtttattagcagtatttttagcaagtgcaactgttgcgattgttggacaactagcctttttaggtattattgtgccacatgtggttagaaagctagttgggggcaattacagagtacttattccgttttctacagttattggtgcatggctattgttagtggctgatttattaggacgagtgatacagcctcctttagaaattccagccaatgctattttgatgattgtcggtggtccaatgctaatttacttaatttgtcaaagtcaacgaaatcgaatctaaaacggtacaacaactggtttagtgatgactgaagaaacgtcgttaataaaagaggatttttatgagaatgaagcgatttttaactattgtacaaattttattggttataattattatcatttttggttacaaaattgttcaaacatatattgaagacaagcaagaacgcgcaaattatgagaaattacaacaaaaatttcaaatgctgatgagcaaacatcaagcacatgtgagaccacaatttgaatcacttgaaaaaataaataaagacattgttggatggataaaattatcaggaacatcattgaattatccagtactacaaggtaagacaaatcacgattatttaaatttagattttgagcgagaacatcgacgtaaaggtagtatttttatggattttagaaatgaattgaagaatttaaatcataatactattttatacgggcaccatgtcggtgataatacaatgtttgatgtgttagaagattatttaaagcaatcattttatgaaaaacacaagataattgaatttgacaataaatatggtaaatatcaattgcaagtatttagtgcatataaaactactactaaagataattacatacgtacagattttgaaaatgatcaagattatcaacaatttttaaatgagacaaaacgtaaatctgtgattaattcagatgttaatgtaacggtagaagataaaataatgactttatcaacgtgcgaagatgcatatagtgaaacaacgaaaagaattgttgttgtcgcaaaaataattaaggtaagttaaacagaaaagaggataattatgaaatttatggcagaaaataggctgacgttaacaaaaggaacagcaaaagatattatagaacgattttacacgagacatgggattgaaacattagaaggctttgatggcatgtttgttactcaaactttagaacaagaagattttgatgaagtgaaaattttaacagtttggaaatcaaagcaagcttttacggattggttaaaatctgatgtctttaaaacagcacataaaaatgttagaagtaaaaatgaagatgaaagtagcccgattatcaataacaaagtaattacatatgatataggctatagttacatgaaataattgaatttaaagaggttgcagtacttgttatgacagttggtattgttaacttttgtaacgaccatacatgatactgatgatggtcgtttttttaatgaacacaaacatgctaacaacaaattgctaaaacgtagtttgatttgaatgtgctttgaaaataatcatcaattatatgattttgatttattttgaagaagaaaagaattaataatgatattttggggcgtatgatttatagtagtagtatcgataaaagaaatttatacaatttgaaataatatgagtgataaaatcgattaatttatattaactatacaatcaaatgttttcatcttattaatgattaatatttttatttttaaaaataaagcgaggagctatctatggaacaaattacttctgcacaaaataatagaattaaacaagcgaacaagctaaaaaagaaacgtgagagggataaaactggattagctttaattgaaggtgtgcatttaattgaagaagcttatcaaagtgggattgtaattacacaattatttgcaattgaaccggcaagattagatcagcaaattatcgcatacgcgcaagaagtttttgaaataaacatgaaagttgctgaatctttatcaggtacagtgacaccacaagggtttttcgcaatcattgagaagccacaatatgatatttctaaagcacaacaagtattgcttatcgatcgtgttcaagatcctggaaatttaggcacgttaattagaactgcggatgctgctggaatggatgctgtaataatggagaagggtacgacagatccttatcaagataaagtgttgcgagcgagtcaaggtagtgtttttcatttgccagttatgacacaagatctcgatacgtttattactcaatttaatggtccagtttatggtacagcacttgaaaacgcagtggcatataaagaagttacttcaagtgattcttttgcattactattaggtaatgagggagaaggtgttaatcctgaattattagcacatactacacaaaatttaatcatacctatttatggtaaagctgaaagtttaaatgtagcgattgcaggtagtattttactttatcatttgaaaggttgaccgtgttgaaagttttccgatataattataattaattgtttaacagaacatttctacgtgattgcatacacaattgaatataaaccaataaaaaggcatggacatttatataaataattgttttagggagaataatcgtgactgcaagttattccaattatttaaagtcttttcacctttttggttacttaaagagatttaagtcggaaagacaatccgttatcaatattaaacaagtgtatgcttaggcataaatttgggtggtaccacggaaatgactttcgtcccttattttttaagaggatgaaagtcattttttagttaaacaacaaatatgataaatagaaaatgaatagttcgaatagggaggtcagtgacatatgtctgaacaacaaacaatgtcagagttaaaacaacaagcgcttgtagatattaatgaagcaaatgatgaacgtgcactgcaagaagttaaagtgaaatacttaggtaaaaaagggtcagttagcggactaatgaaattgatgaaggatttgccgaatgaagagaaacctgcgtttggtcaaaaagtgaatgaattgcgtcaaacaattcaaaatgaattagatgaaagacaacagatgttagttaaagaaaaattaaataagcaattggctgaagaaacaattgatgtatcattaccaggtcgtcacattgaaatcggttcaaagcatccattaacacgaacaatagaagaaattgaagacttattcttaggtttaggttatgaaattgtgaatggatatgaagttgaacaagatcattataacttcgaaatgctgaatttacctaaatcacaccctgcacgtgatatgcaagatagtttctatattacggatgaaattttattacgtacgcatacatcaccagtgcaagcacgtacgatggaatcacgtcatggtcaaggtccagttaaaattatttgccctggtaaagtgtatcgtcgtgactctgatgatgcgacacatagtcatcaatttacacaaattgaaggattagttgttgataaaaacgttaaaatgagtgatttgaaaggtactttagaattgttagctaagaaattatttggtgctgatcgtgaaattcgtttacgtccaagttacttcccattcactgaaccttctgtagaagttgatgtgtcatgttttaaatgtaaaggaaaaggttgtaatgtttgtaaacacacaggatggattgaaattttaggtgctggaatggtacatcctaatgtattagaaatggctggttttgattcttcagagtactctggatttgcatttggtatgggaccagaccgtattgcaatgttgaaatatggtatagaagatattcgtcatttctatactaatgatgtgagatttttagatcaatttaaagcggtagaagatagaggtgacatgtaatgttgatatcaaatgaatggttgaaagaatatgtaacaatcgatgattctgtaagtaatttggcagaacgtattacgcgcactggtattgaagtggatgatttaattgactacacaaaagatatcaaaaatttagttgtcggtttcgttaagtcaaaagagaaacatcctgatgctgataaattaaatgtttgccaagttgatattggagaagacgaacctgtacaaatagtatgtggtgcaccgaacgttgatgcaggacaatatgtcattgttgctaaagtaggtggaagattgcctggtggtattaaaattaagcgtgccaaattacgcggtgaacgttcagaaggtatgatttgttcgttacaagaaattggtatttcaagtaattatataccgaaaagttttgaatcaggcatttatgtatttagtgaatcccaagttccaggaacagatgccttacaagctttatatttagatgatcaagtaatggaatttgatttaacgccgaatcgtgctgatgctttaagtatgataggtactgcttatgaagttgcagcattatataatacaaaaatgactaagccagagacaacatcaaatgagcttgagttatctgcaaatgatgaactaactgtgacaattgaaaatgaagataaagtaccatattatagtgcacgtgttgttcacgacgtgacaattgaaccctcgccaatttggatgcaagcacgcttaataaaagcaggtattcgccctattaataatgttgtcgacatttcaaattatgtgttattagaatacggtcaaccattgcacatgtttgatcaagatgcgattggttcacaacaaattgttgttcgtcaagctaatgaaggcgaaaaaatgacaacattagatgatacagaacgtgaattattaacgagcgatattgtcattactaatggacaaactccaattgcattagctggtgttatgggtggcgatttttcagaagttaaagaacatacatcaaatatagttattgaaggtgctatttttgattctgtttccattcgtcatacatcaagacgtttaaatttacgcagtgaatcatctagtcgttttgaaaaaggaatagctactgaatttgtagatgaagcagtcgaccgtgcatgttatttattacaaacttatgcaaacggaaaagtgctaaaagatagagtatcttcaggagaacttggtgcatttattacaccaatcgacatcactgctgataaaattaatcgcactattggatttgatttgtcacaaaatgatattgttactatttttaatcaactagggtttgatacagaaataaatgatgatgttattacagtgcaagtaccatcacgtcgtaaagatattacaattaaagaagatttaattgaagaagttgcacgtatatatggttacgacgatattccatcaacgttaccagtcttcgaaaaagttactagtggtcagctaactgatcgccaatataaaactagaatggttaaagaagtgttagaaggtgctggattagaccaagctattacgtattcgttagtttctaaagaagatgctactgcatttgcgatgcaacagcgtcaaacaattgatttattgatgccaatgagtgaagcgcatgcgtcattacgtcaaagtttattaccacatttaatcgaagcggcatcatataatgtggcacgcaaaaataaagatgtaaaattatttgaaatcggcaatgtcttctttgctaatggtgaaggtgaactaccagatcaagttgaatatttaagtggtattttaactggagattatgtagtcaatcaatggcaaggtaagaaagaagcggttgatttctatttagcaaaaggtgtcgtggatagagtatctgaaaagttaaaccttgaatttagttatcgtcgtgctgatattgatggattacatccaggtcgtacagctgaaatcttattagagaataaagttgttggttttattggtgaattacatccaacattagcagctgataatgatttaaaacggacgtatgtttttgagttgaattttgatgcattaatggctgtgtcggtaggttacattaattaccagccaattccgagattcccaggcatgtctcgtgacattgcattagaagtagatcaaaatattccagcagctgatttattatcaacgattcatgcacacggtggcaatatattaaaagacacacttgtctttgatgtatatcagggtgaacatttagaaaaaggtaaaaaatcaattgcaatacgattaaattatttagacacagaagaaacattgacagatgaacgcgtttcaaaagtacaagcggaaattgaagcagcattaattgaacaaggtgctgttattagataatgatttaaaccccatgtataaggatatctgaagtagattgatatccttaacatggggttttatttttggattcaccaattaggatccaatttatcttgattaaaaatcaaagaggcacagtggaatacagttgatgcttcgcacaactgcataaaagcctctaatgattaaaaatcaaagaggctttaaaattttttgggctttttcacgatttttaaaatgcttttttgaaatggtatctaaacgtgaaagaccatatttttttataattttggcggcgattacatcgactttagcaccggcacctttaggaattgtcatattaatattttttgatatttgatccatataagtaacaaatgcgtatctagaaattatgcttgccactgcaatggctaatgacttcgattctccttttgtttcaaattttgttttctttggaagtggtatatcggataatgcgtaatggctatacacttcgcgttttgcgaactgatcaatgacgatatagtctaattgagacgaatcaattttttcaagtacatttttgatggcttcattatgaagaacagctttcatttttacttgagtccagccttttgcttgctgaatattatatttttcattgtgtagtgttaatagcgaatgtgggatgaaagtaaccaattgctcagcaagttctacaattttggtatcggttaatttttttgaatcatctacacccaaagtttttaaaataggaacatgctctttggtaacgaaagcagcacatacagtcaatggaccaaagtaatcgccacttccagcttcatcactaccaatacagttaaattgatcatacattaaagtttgttcaagaaaagaattagccatatttttctttttagttttattagtattcaattgagaatgctgcggtagaagttcttcagacacagcttctgcatgattaccttgaaacatgactttacctgattggtaaatatttacagttgtattttgatactttgcacgtgctttcataccttgaggtaaattctcagtatcaaaagaaatgcgtgacattaatgtcgttatgtctttatccgacaatttaaaaacgatattcgccatttgtgtaaatcctttcatataatttcattatcattagcaaaaataatcatatcataaatgataataacgtcagaaacatttatatatgttgtaaagaattaattgcggatacttacaaaatacatagtggtcatgtataatgtttatgaaaatgttatagtgacacaatttaaacatgataaagtattgaatagaaaattctttacattatttcatttcattataaaaagaacattaagtcatctatagagattgtgttgttgttttatcataattgcaatataacaatattagtatcaaattcagacaaactatccagtcatattttataacgtgaatttagattttaaaaaaaggatcaggagaaattataaatggcacagtttaaaaacaaggtaaatgtatctattaatgatcagctttttacaattgttggggaagataacccagagcacatacgatatgtagcacatttagttgatgataaaataaaagaattagggtataaagcagcaggtttagatacttcaagaaaagcaatactaactgctgtgaatattatgcatgaaaaagtactattagaagaagaaaatcgtcgtttgaaacaacaaattcacaaattgcagcagcgtgagcaataaatggtcattgattttatcataatcattttctttgtgtattttgtcatcgttggattcagacgaggtttttggttatctatgatacatttgagtgcaacgattgtatcattgtggattgccagtcaattttacaaatctattgtagaaagattaattgtatttattccatatcctaaaacaacagcatttaatacaacttttgcgtttcattttaatcatctacaaaatcgatttgaagcgattgtagcttttttaatgattacattgttttgtaagttcattttatatctaattatcgtaacttttgataaaataatagcgtatcaaaacattcatattttcagtcgtgcaatgggaatgatagttggtgtgtttatgacgataattgtcttacactttacgttatatctattggcattatatcctaacgaagcattacaacatcagcttaaaatatctattgtgagtcattcattgatttttcacatcccatatttatcggctttcaccattaatttataaattatcataagaggtcaggacaaaggtatatattaatgatacgtcctggtcttctttttatggagtgttattatgacaaaaaaagatgttatcaaattattagaacaaattgctacttatatggaattaaaaggggaaaatacttttaaaatatcagcgtatcgaaaagcagctcaaagtcttgaattagatgaacgaccattagatgaaatatctgatgtaacggagttgaaaggcattggtaaaggtgttgcagaagtaatcaatgattaccgtgagacctgtgaatctcagtatttacagcaattacaggaagaagttccagaaggtcttattccacttttgaaaattcaaggacttggaagcaagaaaattgctaagctatataaagagttgaatattgttgataaagcgtcacttcaagttgcttgtgaaaatggaaaagttagtgaattaagcggatttgctaagaaaacggaacaaaacatattagaagctgtgaaacaacttggtgctaagaaagataaatatccaattgatcaaatgagaagacttaatcaagaaatcattgattatatagatacattaaattatatcgatcaatattcatctgcaggaagcttccgtcgttttaaagaaatgagcaaagatttagatttcatagtaagtaccgataacccaaaagcagtgcagcagcaattattaaatattcccaataaagtaaaagaagttgcagtggggaacacaaaagtttcattagaattagcgtatgatgatgaaacgattggtgtcgattttcgattaattgaaccaagtgctttttatcatacattgcagcattttactgggtcaaaagaacataatataagaattcgacaacttgctaaagcacgtgatgaaaaagtaagtgaatatggaattgaacaagctgatggtacattaattcaatatgatagtgaagccaaaatatatgaacattttaatgtgaattttataccacctgctatgcgagaagatggtagcgaatttgataaagatctaagtaatatcattacattagatgatattaatggtgatattcatatgcatacaacgtttagtgatggtgcgttttctattcgagacatggtagaagcaaatatcgcaaaaggttataaattcatggtaattactgatcattcacaaagtttacgtgttgcgaatggcttacaagtagaaagacttttaagacaaaacgaagaaattaaagctttagataaagaatatagtgaaattgatatttattcaggtacagaaatggatatattacctgatggctcgctggattatgatgatgaaattttagcacaacttgattatgtaattggagctattcatcaaagctttaaccaatcagaagaacaaattatggaacgtttagctaatgcatgtcgcaatccatacgtgcgacatatagcgcatccaacagggcgaattataggtagaagagatggttataaaccgaatattgaacaattaatggcattagctgaagaaacgaatacagtattagaaattaatgccaatccacatcgactggatctgaacgctgatatcgttcgtaaatatccaaatgtgaaattaactattaacactgatgcgcatcatacaaatcatttagattttatgaattatggcgtagcaactgcgcaaaaaggatttgtaacaaaagatagagtgattaacgcattatcgcgtgaagcttttaaagactttattgaaaataatataaaacttaagaaatagagggattttatgagacaaaaaacattagacgtcttagaatttgaaaaaataaaatcactcgttgccaatgaaactattagtgacttaggcttggaaaaggtcaatcaaatgatgccagctactaattttgaaacggttgtttttcaaatggaagaaacggatgagattgctcaaatctataataagcatcgtttaccaagcttgagtggcttatctaaagtatcagcattcattcatcgcgctgatattggcggcgttttaaatgtatcagagcttaacttgataaaaagattaattcaagtacaaaatcaatttaagacattttataatcaattggttgaagaagatgaaggtgttaaatacccaatattagatgacaagatgaatcaattacctgtgttaacagatctttttcaacaaataaatgaaacatgcgatacgtatgatttatatgataatgcgagttatgaattgcaagggattagaagtaaaatttctagcacgaatcaacgtattagacaaaatttggaccgtattgttaaaagccaagcaaatcagaaaaaattatcagatgctattgtaacagttaggaatgaaagaaacgttatacctgtcaaagctgaatatcgacaagattttaatgggattgtacatgatcaatctgcttcaggacaaacattgtatattgagccatcatcagttgttgaaatgaataatcaaattagtcgattacgtcatgatgaagcaattgaaaaagaacgcattttaacgcaactaactggttatgtggctgcggacaaagatgcactacttgtggcagaacaagtcatgggtcagttagattttttaatcgcaaaagcgagatatagtagaagtattaaaggaacaaagccgatatttaaagaggaacgtactgtatatttacctaaagcataccatccattattaaatcgtgagactgttgtagctaataccatcgaatttatggaagatattgaaacggttattattacaggaccgaatactggtggtaaaacagtaacattaaaaacattaggtttaattattgttatggctcaatcaggattgttgattccaacacttgatggtagtcagttgagtgtatttaaaaatgtatattgcgatatcggagatgaacaatcaatagaacaatcattatcaactttttcatctcatatgacgaatatagttgagattttaaagcatgcagacaaacatagtttagttttatttgatgaattaggtgcaggtacagatccaagtgaaggtgctgccttagcaatgagcattttagatcatgttagaaaaattggttctctagtaatggcaacgacgcactatcctgaacttaaagcatatagttataatcgagaaggcgttatgaatgcgagtgtagaatttgatgtagatactttgagtccaacgtataagttattaatgggtgtgccgggtcgttcaaatgcttttgacatttctaaaaagttaggtcttagtttgaatattattaataaggctaagacgatgattggtactgatgaaaaagaaataaatgaaatgattgaatcattagagcgtaattacaaacgtgtagagacacagaggttagaactggaccgtcttgtaaaagaagcggagcaagtgcatgatgatttatctaagcagtatcaacaatttcaaaattatgaaaaatctctaatagaggaagcgaaagaaaaagcaaatcagaagatcaaagctgcaacaaaagaagctgacgatattattaaagatttaagacaattgcgtgaacaaaaaggtgcagatgttaaagaacatgaattgattgataagaagaaacgattagatgatcattatgaagcgaaatctataaagcaaaatatacaaaagcaaaaatacgataaaattgttgctggtgatgaagtaaaagtattatcttacggtcaaaagggtgaagttttagaaattgtcaatgatgaagaagcaattgttcaaatgggaattattaaaatgaagttacctattgaagatttagagaaaaaacaaaaagaaaaagttaagccaacgaaaatggttacacgtcaaaatcgtcaaacaattaaaactgaacttgacttacgaggctatcgttatgaggatgctttaattgaactagatcaatatttagatcaagccgttttaagtaattacgaacaagtttatattattcatggtaaaggtacaggtgcacttcaaaaaggtgtacaacaacatttgaaaaagcataaaagtgttagtgactttagaggtggtatgccaagcgaaggtggatttggcgttaccgttgcaacactaaaataaattataatttgataaattaaatagctgcagttaaaataatgtaaagcaacaagaatacatttcaaacatgttatttgaaataagcataaaaattgagcaaatagaaatacatgaagcatgttatctgatataatttgaacatcataataataattaaggaggattggcatttatggcaatcgtaaaagtaacagatgcagattttgattcaaaagtagaatctggtgtacaactagtagatttttgggcaacatggtgtggtccatgtaaaatgatcgctccagtattagaagaattagcagctgactatgaaggtaaagctgacattttaaaattagatgttgatgaaaatccatcaactgcagctaaatatgaagtgatgagtattccaacattaatcgtctttaaagacggtcaaccagttgataaagttgttggtttccaaccaaaagaaaacttagctgaagttttagataaacatttataagttacaaccaatgacgactggggcatttctttaatgaattgctccagtttttgtttgtgtttttaatataaaaagttgaatgataagtcatcatattgtttacgacttgagaatggtgggattaataaatctatgaacgataaatgataatcaagcatgctaatagacatgtagcagttggtttgataaaacaatgtttaatattacatgatgtgcatgaaaagtcatactcgaagatgttgactatgaactagaattagtggtgataaatttgaagcacttttgtagtatcattcattttaaaattagaaggggggatatttttggaagactataagcaacgaattaaaaacaaattaaatgtcgtacctatggaaccaggctgctatttaatgaaagatcgtaatgatcaagtgatatatgttggcaaagctaaaaagctaagaaatcgattgcgatcatattttacgggcgctcatgatgctaaaacaacgagactggttggtgaaatacgtcgctttgagtttattgtcacgtcaagtgaaacagagtcacttttactggaattgaatctgattaaacaatatcaacctagatacaacattttattaaaagatgataaaagttatccatttattaaaataacaaaggaaaaatatcctagactactagtgacgagaactgtaaaacaaggtactggcaaatatttcggaccgtatccaaatgcatattctgctcaagaaactaaaaagttattagacagaatatatccatatcgcaaatgtgataagatgccagataaattatgtctttattaccatattggacaatgtttaggaccatgtgtatatgacgttgatttgagtaaatacgcacaaatgacgaaggaaattactgattttctgaatggggaagacaaaacaattttaaaaagtttagaagagcgaatgttaactgcaagtgaatcacttgattttgaacgagctaaagaatatagagatttaattcaacatattcaaaatctaactaataaacaaaaaattatgtcatcagataaaacgattcgtgatgtctttggttatagtgttgataaaggatggatgtgtatccaagttttctttatacgacaaggtaatatgataaagcgagatacaacgatgattccattacagcaaacagaagaagaagaattttatacatttattggacaattttatagtttaaaccaacatattttacctaaggaagttcatgtaccacgtaatttggataaagaaatgattcaatctgttgtggacactaaaatcgttcaacccgcgcgaggtcccaaaaaagatatggttgacctagctgcacataacgctaaagtatccttaaataataaatttgaattaatatcacgtgatgagtccagaacaattaaagctattgaagaacttggaacacaaatgggaattcaaacaccaattagaattgaagcattcgataattctaatatccaaggtgtggatccagtgtcagcaatggttacatttgtcgatggtaaaccagacaagaaaaattatagaaagtataaaatcaaaacggttaaaggtccagatgattacaaatcaatgagagaagtagtaagacgacgatattctcgcgttttaaacgaaggattaccattaccggatttaattatagtagatggtggtaaaggacatatgaacggggttattgatgtgctacaaaacgaattaggtcttgatatccctgttgcaggtttgcaaaaaaatgataaacaccaaacatctgaattattatatggcgctagtgcagaaattgtaccactgaagaaaaatagccaagcattttatttgttgcaccgtatccaagatgaggttcacagattcgcaatcacctttcatagacaaacacgtcaaaagacaggcttgaaatcaatccttgatgatatagatggtatcggtggcaaacgtaaaacattattattgcgtacattcggttcaatcaagaaaatgaaggaagctacacttgaagattttaaaaatataggtattcctgaaaacgtcgcaaagaacctacatgaacaattgcataaataaatactgggcgtgagaatcattctcatgccccaaaatatatgaaataatgttacaatatgtttaacaaagttatttttttgaatgtacgtggaagcgttttctaaatgagaaagtttatcatcataagcaatcttaaatatcgaatccaaatgttacattgttcgacatgcagtttggtgatcgtgcagtgtgtatttgtctttaatttgtttcgcttaatgataatgacaacgctagaaacgatatcactttaggggggttaagcgtacgtttaatataaatagctcaataaattaaatattcgttcacaggggggactccttttggctcaatcaaaaaatgaattttatctaagacgtattcactcgttattaggtattatcccaataggtgcatttttggtcgttcatttattagtgaatcaccaagcaacacaaggtgctgaagcgtttaataaggcatctaactttatggaatcattaccatttctaattattgtagaatttttatttatatacattccgttgttatatcacggtttgtttggtatacacattgcatttacagcaaaagaaaatgttggacattactcgatttttagaaactggatgttcttcttccaaagagtgagtggtattttaacatttatctttattggtatccatttatggcaaacacgtttacaaaaagcattttacggcaaagaagtgaattacaatttaatgcacgaaacattgcaacatcctggatgggcaatattttatattatttgtattattgctgttgtgttccactttgcaaatggcttatggtcattcttagttacttggggtggacttcaatctccaaaatcacaacgagtatttacatgggtttcattaatcgtattcttagttatttcgtatattggtgttactgcaattattgcctttatgtaatacatcgcatttaacaaatatagattgaaaatttaggggagtgacatttttatggcagagaaacatcttattgttgtcggaggtggcctagcgggcttaatgtcaacaattaaagcggcagaaaaaggtgcacatgtagatttattctcagttgtaccagtaaagcgttcgcactctgtttgtgcccaaggtggcattaatggtgcggtcaatactaaaggggaaggcgattctccttggattcactttgatgatacagtgtatggtggcgacttccttgcaaaccaaccacctgttaaagcgatgacagaggcagcacctaaaattattcatttattagaccgtatgggcgtaatgttcaatagaacaaatgaaggtctattagattttagacgtttcggtggtacattacaccacagaacagcatatgcaggggcaacaactggacaacaattattatatgcattggatgaacaagttcgtgcatatgaagtagatggattagttacgaaatatgaaggatgggaattccttggcatagttaaaggtgacgatgatagtgcaagaggtatcgttgcacaaaatatgacaactgctgagattgaaacatttggttcagatgcagttattatggcaacgggtggccctggtattattttcggtaaaacaacaaactcaatgattaatacaggatcagcggcttccattgtttaccaacaaggcgctatttatgctaatggtgagttcattcaaattcatcctactgcaatccctggtgatgataaactgcgactaatgagtgaatcagcacgtggtgaaggtggacgaatttggacatataaagatggtaagccttggtacttcttagaagagaaatatcctgattatggtaacttagtacctcgtgatatcgcaacgcgtgaaattttcgatgtatgtattaaccaaaaattaggtattaatggcgaaaacatggtatatcttgatttgtcacataaagatccacatgagttagatgtaaaactaggtggtatcattgaaatttatgaaaaattcactggtgatgacccacgcaaagtaccaatgaagattttcccagctgtccactattcaatgggtggtctatatgtagattatgatcaaatgacaaatattaaagggttatttgcagctggagaatgtgacttctctcaacatggtggtaaccgcttaggtgccaattcattgttatcagcgatttatggtggtacagtagcaggtccaaacgcgattgattatatttcaaatattgatcgatcatatactgatatggacgaaagtatttttgaaaaacgtaaagttgaagagcaagaacgttttgataaattattagctatgcgcggtacagaaaatgcatataaattacaccgtgaacttggtgaaattatgacagcaaatgtaactgttgttcgtgaaaatgaaaaactgttagaaacagataaaaagattgttgaattgatgaaacgttatgaagatattgatatggaagatactcaaacttggagtaaccaagcggtattctttactcgtcaattatggaacatgttagtacttgcacgtgttattacgattggtgcatataaccgtaacgaatcacgcggtgcccattataaaccagaattcccagagcgtaatgatgaagagtggttaaaaacgacaatggcctcattccaaggcgcatttgaaaaaccacagtttacttatgatgacgtcgatgtgagtttaataccacctcgtaaacgtgattacacaagtaagtctaaagggggtaaaaaataatgactgaacaatcagtgaaaaacactccacaacatgaaacacaatctaaaccgaaacaaaaaacagtaaaattaattattaaacgacaagatacaagtgattctaagccttatgaagaaacatttgaaattccatatcgtgaaaatttaaacgtcattgcatgtttaatggaaattagacgtaacccagtgaatattaaaggtgaaaaaacaacacctgttgtctgggatatgaactgtttagaagaagtatgtggagcatgttctatggttatcaatggccgtgcaagacaatcttgttctgcgattgttgatcaattagaacaacctattcgtttagagccaatgaatactttcccagttatccgtgacttacaagttgatcgttctagaatgttcgataacttaaaacgtatgaaagcatggatcccaatcgatggaacgtatgatttaggtccgggaccacgtatgccagagaaaaaacgtcaaacagcttatgaattatctaaatgtatgacatgtggtgtatgtttagaagtttgtcctaatgttactgaaaataataaatttgttggtgcgcaagcaatctcgcaagttcgtttgtttaatttgcacccaacaggatctatgactaaggatgaacgtttaaatgcgttaatgggtacaggtggcttacagcaatgtggtaattcacaaaactgtgttaatgcttgccctaaaggtattccattaacaacatccattgcagcaatgaacagagaaacaacattccatatgtttaaatcattctttggttcagaccatgaagtagaataaaaattaatcccttttgagttaaaatgttatgttcctttcaaaattaaattgaatggagatacacaataacttagaagggatttttttaataggcagattacatgacaatatgatagtgggctgatttaaaacaagtattatattataatgacaaaaatggtaaacacagtgcataatactaaaatccaatgcttagttatgataaactaaaaattaaattaaaagtaaggatgaccgaatatgaataaaccaataggtgtaatagactctggtgtcggaggtttgacagtagctaaagaaattatgcgtcagttgccaaatgagacgatttattacttaggtgatattgggcgatgtccatatgggccaagaccaggagaacaagtaaaacaatatacagttgaaatcgctcgtaaattaatggaatttgatataaaaatgctcgtgattgcttgtaatacagcaactgctgtagctttagaatatttacaaaagaccttatcaatcccagtgattggcgtaattgaaccaggtgctagaacagcaataatgactactagaaatcaaaatgtattagtactaggaacggaaggtacaattaaatctgaagcatatcgtacgcatattaaacgtataaatccacatgtagaggtacatggcgttgcctgtccaggttttgtgccacttgtagaacaaatgagatatagtgatccaacaattacaagcattgtcattcatcaaacactgaaacgttggcgtaatagtgagtctgatactgtcattttaggatgtacccactatccattgctctataaacctatctatgattattttggtggtaaaaagacagtgatttcgtctggattagaaacggctcgtgaagttagtgcattgctaacatttagtaatgaacatgcaagttatactgaacatccagatcatcgattttttgcaacaggtgatactactcacattactaacattatcaaagagtggttaaatttatctgtcaatgtggaacgtatatcagtgaatgactaggaggatttttaatgaaagagattgttattgcatcgaataatcaagggaaaataaatgactttaaagtgatatttccagattaccacgtaataggtatttcagaactaatacccgattttgatgtggaagaaacaggttcaacatttgaagaaaatgctatattaaaatcagaagctgctgcaaaagcattgaataaaacggtcatagctgatgacagtggactagaagtttttgcattaaatggtgagccaggtatatactctgcacgttatgctggtgaaaataaaagcgatgaagcaaatattgaaaaattattaaataagcttggtaatacaactgatcgtcgtgcgcaatttgtttgtgtcataagtatgagtggccctgatatggaaacaaaagtatttaaaggtactgtttcaggtgaaattgcagatggaaaatatggcgaaaatggtttcggatatgatccgatattttatgtaccgaaattagataaaaccatggctcaactttctaaagaacaaaaagggcaaattagtcatagacgaaatgcgattaatttacttcaagcttttcttgaaggtgataaaaatgtctaaatggattattgtgagtgataaccatactgaatcaggcgttttatatcaaatttatgaaatgcacccagatgcagatgtatatttacatttaggagattcagagttcgcgtatgatgatacggaacttagcttatttaatagagtaaaaggcaattgtgatttttacccagaatttgaaaatgaagcggtcgcaaaatgtaatgacgtgaaagcattttacactcatggacatttatatcaagtcaatcgaacaagagatttattagctgaaaaaggacttgaattaggttgtttgtttgcattttatggacatacacatgtggcaaaatatgagtatattaatggtgttcatgttattaatcctggaagtatatctcaatctagaagttcaatggaagaaacatatgctgaagttattattgatgatcaaactttacatggcaccatcaatttcaaaaatcgacatcacgaaacaataagtcatactactttttaaatagaaagtagctatggctttttttagtttatagactgatttaactaggaggtcgtgacatgaatgtttatttaaaagtatttctgacaattttataagatacctggaatgaataacacatttatgttatgaaaagaattgtaattttggggaatgtgattgttgatggtcctatatggttgaatcatgttgattatttggttaaaagtgtattattaaaaagtataaaattaagattccaagaagtcaggaaatttgaaattttagttaaaatcatgaatcgtatacatatttaaaaggatttctaaaggcataaattatatcaataatttgatggttaaatatggagtagcaaaattcttgaaattcagaaatgtagtgacacaaatattaatgtttagttaataaatagttaatgtagttttttgtatctgtctattattataaatatatacaaaataaatatttgaggataggtgttattaattatgaaaaagaattttattgggaaatcaattttaagcatagctgctattagtttaacggtatcaacgtttgccggtgaatctcatgcacaaactaaggttgaaaaatataacgagtatcaaacaaactttaaaaaacaagtaaataaaaaagttgtggatgcacaaaaagctgtaaacttgttcaaacgtacaagaactgttgcaacacaccgtaaagcacaaagagctgttaacttaattcatttccagcacagttatgaaaagaaaaaattacaaagacaaatcgatctagttttaaaatataatactttaaaataattgatagaagtcatgctatagagtgtggcttttttgctatatccaaaggtataattaatttataatgttgtgttcatttgaatggtgaggttattgggataaatcttatatataattacttaaaagtgaatgcaatagttgtttatgttttgaataagcgaggtggctattgtgaaaaggaaatcgaatgtattaacaatcataaaaattgtaacggatatagtggcaaccgtgttaatcatacgtcctttattaaacagtcgtaaagatgctaaataaattggaagttacttaaaataaaaaagcacgccaaaacgttagcattgttttctaacgtttggcgtacaactatttaattcagtatattaattaatcccaataaatcgagtcgatttcaccgtttttaacaactttaatattttttctgttctcttctaaaggacgagttaagtcaaaagtatagtaatctctaggaccaccatctttaattctgacaactgctttcttcacatcaccttggcttaattttttaacaataaggtacagatcattaacagtttcagctttgtaaggagtttgatttttatcagactctttcattaacttatcaatacgttcatcgtcctttttagcttgatctgctaaatttttagcgatttctaaacctctccattcataactaaagaaagctttagcatcattagtttgagttaaaagacctgcagcgattactgtagatgcgataatagtttttgtgatattttttttcataataagttctccctgtaaaataaatttgtacttactaatgcgagtacactgctattttacaaacggtttcatgcatttaccagttaacacttcattaattaaaattaagtgcaaattaataaggtttaatgcaatcgaaaaagaataatgatgaatttgatgttattatttttatttgaggtattattgaatttgttgatagtataataatagtagtaaacgtcactcaactatgattgaatgatttttattgttaaaactatatatatttctctgcattttgtttgctatgttgagtatacaaacactccaaattgttatacacatagcttttttgataattaatgtttataaagcaaagaaatgacacatagtagagaagtgattaatatgtataattttacttataaagaaataagagatatattctaattaaggttgatatgttatgattaatatataagttaaatattatactatttagttgaattatacattttcgaagtaagcataattcaacacttacatttttaaatagataaaatagtgtaaaatcacgtgccaagattactatagagtaggcattgagtattattggcaatcacttaagtgattgttattttttcgtggtcaataataaagatataaataaatatattgaggtcaaacgatgataattaaaattttaacaattctattactactttgtatattgagctatttggttacaaatagaaagaagccttttctgttcttaaagacactctttatgggtgtggtatttatctttataggatatatttcactggcgatatctgccgtaattatttatggtattattcaatttatcacaattgattttggtagttttttcttaatgggtattatattgatcttgatttcaagtatattccaattatttatagttagattactttttagaaaaaagaatgtcgatttgacagaggttgtcgttttagaacatttaattcaatggttcttagtttactttgcgatctatcaggcagtaaatgaaaaaatggacattaatgatattaatatcgacaatttccaatctgtcttttttgacgtgtctaatttgaatttagtaattctaccaacattaatcattagctgggtaacaatatttaactataggatgagaagttacaaataaaatctatgaaattataccatcagacaccaacattcaaatggtgtcttttttgttgtgtggttttatttttgaaattcgaaaaagtagaggcatgaattttttgactagtgtataagtgctgatgagtcacaagatagataactatattttgtctatattataaagtgtttatagttaattaataattagttaatttcaaaagttgtataaataggataacttaataaatgtaagataataatttggaggataattaacatgaaaaataaattgatagcaaaatctttattaacaatagcggcaattggtattactacaactacaattgcgtcaacagcagatgcgagcgaaggatacggtccaagagaaaagaaaccagtgagtattaatcacaatatcgtagagtacaatgatggtacttttaaatatcaatctagaccaaaatttaactcaacacctaaatatattaaattcaaacatgactataatattttagaatttaacgatggtacattcgaatatggtgcacgtccacaatttaataaaccagcagcgaaaacagatgtaactattaaaaaggaacaaaaattgattcaagctcaaaatcttgtgagagaatttgaaaaaacacatactgtcagtgcacacagaaaagcacaaaaggcagtcaacttagtttcgtttgaatacaaagttaagaaaatggtcttacaagagcgaattgataatgtattaaaacaaggattagtaaaataaaacttcaatcgttgctgttatgtggaaataaataattaaatgttatgttaatttttattaatgaaaaaagtaatctatttaatgacaggttaatgtaattgtcctgaaattgacaatataatcagtaagtatcaattttaaggagagtttacaatgaaatttaaaaaatatatattaacaggaacattagcattacttttatcatcaacagcgatagcaactttagaagggaataaagctgaggcaagtagtaagaaggattatataattcaaagtgagtatcatgataaacaaattgcagatgagctaagatcattacttaataaatctaatgtatatgatttagctgcaggtagcttaaatcgctattataagcaaacgattatgatgaatgaacatagagctaaagcggcattaaggagcaataatttcgataaaatggctgaagctaaagttgcgttagaaaaaatatacaaagaaatttatgaaattataaatagataataaataaaacaggttgagacagcagtaaaaatggtcttaacctgtttttaatttgcatatgtgataaattctatatcaaaatgcttatgtataatgaatgacatttaaaagtaggggagactaatataaatacaatagttcctagtgttactctcaaaataactatatcaattatttattttgctctcctatttttttaaaattgtacatgttttaacaatcaaaattgtacattattaaattatcatttccagttctagtgctatattggtagttagttgactatatgaaaatacgcatgtaacaagttttttcaatactcgtggggccccaacacagagaatttcgaaaagaaattctacaaacaatgcaagttggggtgggccccaacatagagaaatcggatcaccaattccaacagacaatgaaagttggggtggggtcccaacacagaagctggcgaaaagtcagcttacaataatgtgcaagttggcgggtcccaaacataaagaaatactttttctttagaaattagtatttcttatgcatgagttttactcatgtattcattttttaagtacacattagctacagctaatgataaagaaccactacataataaatcattagtggttctttatcatttctatctcactcttttactggaagaaaaagtttacgtttgtagaacatgccacaataccaaaaataattaagaaaaataagacgataagcatgatgacacttttcaaacaacctctatcagtttcttccgattttctttgttgaacctttttataatcttcaagtagttttgtcgcttttttatttatatgtttattcatgatgttgactccttataatatatgtttaattcattaaaatagttgaaaacatgacttgaaataaagatataaagctaaagtaaggatgttcaattgtttcaaattttatgaaagtataacgttaaatatgttaatttgatgataagatgtgctttttattttccaaatggaattcccttaaactgatgcattaaaatattaatgaagcactagaatacataaatgaatagtaatggtgcacagtatagaataattaaggctatattaagtataaatatcgttaactgtaagctatctttagttttaatataaactattaggataatcgacgtaagaagaatcatatatattaatgatgaagaagtccatacaaaatccgcatcatttgttgttaataatgggactataattaatccgaaattaatcatgcatgctatatatactataatgttatacacaatgttaatttttgttcaccaccttatacttctattttaaaaacttctttataatgatatattgtttaatgttgaaataattagattatctaattttcatttgctttacatgtaaaaggctatatatagtatgctctttatgattctaaatgctttttaatatttaatgctcatcaacatttggattttgaatattcaattcaaaaactttattagctacgtcaattgtaaaatcagaaccatagttgacatgagctacttttaattttccatctaaataatagattgcgattgcaacatcgtaaaattcgtcaatgacaaataaactcttttcgtttgctacaacctcatgctctcctgagtatacaacgttaatttcccaatcattaaaaaccatttgttaacctccttgaacatttaaattgattcaacttaagtttaacttattcatacaacttcgtacaatatctagatgaacattaattgtatttctagaaatctttttcaattatatgtactaattatagttttaaatttcttatttcagtatagttttaaaacgattttaaaataattctgcaaatatattaacacataatgtgttcaaaaagttttgaacaatttcaaaacttttatataaagggtttgacaacatggaattcaaatatcttattttaaaaatcacctcatatagtgtcatgtttagtctaacttttaagtcaggaaagaaaatcaagtagatagtttaaattaaaaaaatcataagttaattaaactaaattcagtataaaaattagccgaaaaacatcatttctgaagttatcggctaaagttataaattatatttatttgtacatgaacaaataatttacattaatttgtcatttcttctttttcccaatcgattttatatctttctgaagaacgatctgtccatttatctttagtattggtacctttccaatttgttgaagtccaatgcaattggtagtcatcacgaactcgttcgtatattacatctatatttgtttgttgtttggatgcttttctatccatagtaataactgtagcgaagtctggtgaaaaccctgaagataatagagaacttgctttgttaggatcaaggaagttatctgctgctttcatagagccatttctagttttcatgaaaagttgattgccatataccgggttccaagaatctctatcatatggtccccaattttgattcaccatattgttaaatatcactttccagcctacttttttatcagttgggctctctaaaattgttttgaaatccggttgaacatatttgagtgtatgaccaatcgaaacatttgcaccaataaggccaccaatttttcctgtatcatcaccagtaacattaccgttgaatccataagttaaagtactcatatactcttttgtatcaatcgaatttcttggatagtaatcagatatttgagctacttcattatcaggtagttgcagctgtaccttaaaggctgaaggccaggctaaaccacttttgttagcaccttcttcgctataaactctatattgaccagcaatggtacctttcgttctaataactagcagttttttattgtgatttttatcatcgataaaactataaaatacttttttgtgcatgccattttctttatcataagtgactaaatcacctgtttttactgtagtattgcttccaatatctgtagtaccggttttaatattaatatcagaatctgcggcattagcgacaggattcattaatatggaacctagcaatagtgttgttgttactgagctgactatacgtgttttcattttcatcatccttctattttttaaaacgatttgaggaaacaataatcaatatgtcaatttagaatattgcagttgagacatatcaaatatttataatcgtttatattagtatatttaatgtagcaactgataaattactgagtgatgatgagtgattattttaagaatatgtttttaacttttatttaaaatttgaaaggaagcatttcaatttcgagggttagtcaaagttgaataaattctttatgaaacaaggaaaagacatagctaattttattgattaatttctttaaaactaatgaattgtttgatttgaaaatgtaatcgattacaatataaaaatacaaatatcttagaattaaatcaattaattaactattaaataaaaattaactatatattaactagtgtaaattaataaatagaaatagagaaaaagggtattaattatgtttgaaatttcgtcgggaataaattttgccgatacatagaaatatttaatagataacgaaaaagtatcgtatgtatttttaatatagtgtaaaatattatatgtaaaataaaatgtaggtttttagttagaggcattataacaaaattttgagattaggttagcttttaatgatgaatcttattgaaatttgattaataaaaatatgataggggattaaaatgaaactattttatatcgtatttcttattgttatatggctgaatatatttttaggaaatgaaatcatccatacactgactgttttaataacaacattgtatattgttaattcaagaaaggggattaaaaatgacagtgttgaataatattataaactctcttcaatctttgtttgagtctgaatcaggctataaaatttcgaaaaattcaggagttccatatcaaacagtacaagatttaagaaatgggaaaaccaaactagaagatgctagatttagaacgattattaaactttatagttattatgtctcattaaaagaacactaatcatgggacaataaagtattgctaaaataattgaatcattaaatgaaggaatagagcctaagacataataaatcaatgtcttaggctctacaatattatattggtagtagttgaccgaatgaaaatgcccatgtaacaagcatttttcaattataggcggggccccaacatagagaatttcaaaaagaaattctacagacaatgcaagttggggtggggccccaacatagaagctggcggaaagtcagcttacaataatgtgcaagttggggagtgacaacgaaataaattttataaaatatcatttttgtcacattcctactcccaattctatttaaatatatagaaaatttcacctattatatagatcatacactttgaaaattatcatttaaataatctgatttggaattaaagtgcatgaagtataagtcatcttcttatactaatcaaagaggacgtcaacagttattttattaggatttttaacataaacatttgctaaatctgaatgtaatcttttgcttaaatcaatagtgtagttattaccgccaccggtgatcttaagcttacctttattacgattttcgttatataatattttattttttattaacgcttctcgtgcacggaaatcgatttctttcaatgttaatactggtttattgccttggtatattttatgtgcaccaataatcgtttgtagtttatctttgtattgcacaaaaagattataagttttatcagaaggttttgcggctggtgtaacaccacctgtaaatgtctctctataagaccaccataactgatcagtatctttgtcttttagtccaaacacatctacgtaacgatcttttaactgattaatatttccccaactttcagcgccccataaagaaatatgtgctgaccatgaatatctcttaagttcaacataaatgtttccattatcatattgatatagccatttatttgaaaatgaaaaatgaggctgtgtgtaatatttaattaattcattgatgttagtttcatcttgaccaatgctataagctttagcttcagagtaaaaactaaatactggtttttgattttgaggtaatactgtacctaatagtaataatgttgtcgttaaaattatatttttcgtgatgttcttattcattagaacatctcctttcagaggaatcatgatacgaggaataacaaatttatatgtgagcgaagtcaatatagcatttgcgattatttttattaactccgttattattgttagtttgatttttcgaggataacttcaatttttgcattttgaggttttttaacatatctatttgcatcagttgatggcaaccttttacttaaatctattgtgtagttattgtctgcacctgttattttaatttgtcctttgttataagaattattatataattttttacttttaattaatgtttgacgaatacgaaaatctaattcttttaaagttaaaacaggcttattaccttcataaactggaaatccgccagtaaacgtttctgctttatctttatatgttacattcagtttatagtgtttatcgttagatgttgctgcaggagtaacaccaccagtaaacgtttcttgagataatgcaaaagaatcaatggtttcttggtcttttataccaaaaatatcaacgcttttatttcttaattggttgatattgccccaactttcaggtccataaacttgaatatgactataccaagaaaactgtaacaacgttgcatgaatcgtaccgttatctttttgccataacgttttgttagagaaggttaaatgttgctgcgagtaatatttagttaactcattaacgttagtttcattttgatttatataataagctttcgcttcagttgaagaactgataggtgtattaggaaattgtgttgatgctgtacctaatagtaacaatgttgttgataaaataatttttttcgtgatgttattgttcattcgaatttctcctttgagtactgttggaatgtttaattataaaaaggggttaattagataattgaaattatccgcattttcaaaaggtaataggttagttagatttttcgagtatgacttcaatttgtgcatttttaggatttttaacataacggtttgtatcagttaattttaattttttacttaaatcaatcgtgtaattatttccatcagcagttatcttaatttgacctttattaaattctccgttatataactttttattctttattaatgtttgacgaatacggaaatctaattcttttaaagttaatactggtttatttcctttgtaaaattcatgtccaccgatgatagtttgttgtttatcactatattttaaaaatagtctataaggcttatcagatgaagtagctgctggcgtaacaccaccagtaaatgtttcatcataagtccagtaaccttcaactgtgtcctcatctttagttccaaatatatcaacgtatttatttcttaactgattaatgtttccccaactctcggatccaaacacttgaatatgactataccaaacccacgtttgcaatgttgcatgaatgctaccattgggcttttgccataaccatttatttgaaagtgataaatgaggctgtgaataatactttattaactcattgatattagtctcgttttcactgatattataggcttttgcttcagatgaaaaactgattggtgttttaggaagttgtgttgatgtggttcctaaaagtaacaatgctgttgataaaactaatttattcatgatgttctttttcatatgaaaatctcctttgcgtgaattacccaaagtatataagctattacaccgattcggaattaaataaaagctaaaactatgttaaataaacttaaacagttagtagtgttatttaagcaaaacttatcatttttaagttttggacagaaacagtacctaataaagtaggctggagttatatattaaaaacgacacattagaattattctctaatcaattgcattaaattgtttgataattgaattttctaactacttgaaaaatagttatactttaaatgtagtacttattttaataatttcctactacttaaatttaatattaataaaatgttcatttaattattgataaaatattacaaattttaatagtaggttgtgtttattttgtatacgcttacaatttaggtgtaactaaaataaaaggagttgttattaatgaaaaatttacgaaacagaagttttttaactttattagacttttcaagacaagaggtagaattcttattaacactctccgaggatttaaaacgtgctaaatatattggcactgaaaagcctatgttaaaaaataaaaatattgcactgttgtttgaaaaagattctacaagaacgcgatgtgcatttgaagttgcagcgcatgatcaaggtgcaaatgtaacttatttaggcccaactggatcacaaatgggtaaaaaagaaacaactaaagatactgcacgtgtgcttggtggaatgtatgatggcattgaataccgtggtttttcacaaagaacagtagaaactttagctgaatattcaggcgtaccagtgtggaatggtttaactgatgaagatcatcctactcaagttcttgctgatttcttaacagcaaaagaagtcttaaaaaaagattatgcagatattaactttacatatgttggagatggtcgtaataacgttgcaaatgcattaatgcaaggtgctgccattatgggtatgaacttccatttagtttgtccaaaagaattaaatccaacagatgaattattaaatcgctgtaaaaatattgccgctgaaaatggtggcaacatattaatcacagatgatattgaccaaggtgtaaagggttcggatgtaatttacactgacgtttgggtatcaatgggtgaacctgatgaagtatggaaagaacgacttgaattattgaagccatatcaagtaaataaagaaatgatggataaaactggtaatccaaatgttatttttgagcattgcttaccatctttccacaatgctgatacgaaaattggtcaacaaatttttgaaaaatatggaattcgagaaatggaagttacagatgaagtattcgaaagtaaagcttcagttgtattccaagaagctgagaacagaatgcatacaataaaagcagtcatggttgctacattgggtgaattttaaatgatataaggaagtgaatatgatggcgaaaatagtagtagcattaggtggtaatgctttaggaaaatcacctcaagaacaactcgagcttgttaaaaatactgcgaaatcattagtaggattaataacaaaaggacatgagattgttattagtcatggtaatgggccacaggttggaagcattaatttggggcttaactatgctgcagaacataaccaaggtccggcatttccatttgctgaatgtggcgcaatgagtcaagcttacatcggctatcaattacaagaaagcttacaaaacgaattgcattctattggaatggataaacaagtggtaacactagtgacacaagttgaagttgatgaaaatgatccggcatttaacaatccttcaaaaccaattgggttattttacaacaaagaagaagctgaacaaattcaaaaagaaaaaggatttatatttgttgaagatgctggaagagggtatagacgtgttgttccttcaccacaacccatctctattattgaattagagagtattaaaacacttattaaaaatgatacactcgttattgctgctggtggtggaggtataccagtaattagagagcaacatgatggttttaaaggtattgatgcagttatagacaaagataaaacaagtgcgttgttgggtgctaatattcaatgcgatcaattgattattttaacagcaattgattatgtatatattaattttaacactgaaaaccaacagcctttgaaaacaacaaatgttgatgaattaaaacgatatatagacgaaaatcaatttgcaaaaggaagtatgttaccaaaaattgaagcagccatatcatttattgaaaacaatccaaaaggaagtgtgcttataacatcattaaatgaattagatgctgccttagagggtaaagtaggtactgtgattaaaaagtaattgaattgaaacgcttttcaattactatatgtcaaatgcatgatttttattatttatgtgcacccctgaaaataatgcctctattttgatgcggggtgcactttcttaatttatatttataaaatctttaaggtagaaatgctaggttaaatgtcgaaggagatgaaaccgtggaaaatacaattaatgaaagtgaaaagaaaaaacgatttaaattaagaatgccaggtgcatttatgattttattcattttaacggttgttgcagttatagcaacatgggttattcctgctggtgcatattctaaactttcttacgaaccttcatcccaagaactaaagatagttaaccctcataaccaagtgaaaaaggttccaggtacgcaacaggaactagacaaaatgggggttaaaattaagattgaacaatttaaatcaggtgcaattaataagccggtatcaattccgaatacttatgaaagattaaagcaacatccagctggaccagaacaaataacaagtagcatggttgaaggtacgatagaagcggtcgatatcatggtattcattcttgtattagggggacttattggcgtagttcaagccagtggttcttttgaatcgggattgctagctttaacaaagaaaacaaaagggcatgaatttatgctaattgtgtttgtatcaatactaatgattatcggcgggacgttatgtggtattgaagaagaagctgtagcattctatccgattttagtccctatatttatagcgttaggatacgattctatcgtttctgttggtgccatattccttgccagctctgtcggtagtacattttcaactattaacccgttctcggttgtaattgcctctaatgccgctggtacaactttcacggatggtttgtattggagaataggtgcttgtattgtcggtgcgatttttgttattagttatttatattggtactgtaaaaaaattaaaaaagatcctaaagcgtcatattcttatgaagacaaagatgcttttgaacagcaatggtctgtattaaaagatgacgatagtgcccattttactttgcgtaagaagataatccttacattatttgtactaccatttccaattatggtatggggagttatgacgcaaggttggtggttcccagttatggcttcagcatttttaatatttacaattataattatgtttattgctgggacaggtaaatttggattgggagaaaaaggaactgtagatgcttttgtcaatggtgcatcaagtttagtaggtgtatctttgattattggtttagctcgaggtattaatttagtgttgaatgaaggtatgatttcagatacaatcttacacttttcatcatctttagttcaacatatgagtggaccattatttatcatcgtattactatttattttcttctgtttaggttttatcgtgccatcatcttctggattagcggtattatcaatgcctatctttgcaccacttgctgatacagtaggtataccaagattcgtcatcgttacgacatatcaatttggtcaatatgcgatgttattcttagcgccgactggacttgttatggccacactacaaatgttaaacatgcgatattcacattggttccgatttgtatggccggtagttgcttttgtattgattttcggtggtggagtactaattacgcaagtactaatttattcctaatttgaaatgctatattataaaaaaatactaattgggttttatgcatctcgtaggtttgtagaaatactaaactaagcgaggtgcattattatttttgattaagaaaataatggcggtaatgataacactagtaagtaattgatacaatgttctatttaataatgatatttttaaaatatgtttttaatgtaatgttagatctatggtatattatatttatcgtggtaaatatgtatttgctttaaacagtttttgtaacacatgatacatatggttgtgaaaatagcataaataaaggatggctataaatgacacatttgacaaaggttttagatacactaactggaatatgcgtagtattattatttagtaaatattttgtggcgtatgcaaatatggtatttgattggaatttaagatggtatatgctagaaaacataccacatttgccaattatattatttattctgatgtttattttcggagtaccttctgaaatgataaaagataggcaaaggaaaaataacggcgtttaatttatcgatatgtagaggtgataaaacttgtcaactattacaaaaactaaaataaaaatctttattaattattttattggtatattagctttggcgtttgctgcttatatattatttaaataaagaatagagtgaaacgtgtttatgaattagacgttctagtatagttactacagctttagtcaaaaggtatcattgttgttcatacataagatgatattaaatcaaggaggtattgatacacaccaaaaagaggcaagattacctgcctcttttttagttattaaatatgcgtgttaattcttggtaatagtgttactgagacgcattacgaagaaatttatcttgattttccttttttaaaaagaagtgaagatatcctataaagactctaagtactattacagtggctaataacacttcgataaacaaaaggcctttccaaatgactggaaacataagtacaggcaaactgttctttaaagcagttgcagagattactaaagggaatgtgaaagctgaaaatacgggcgaaaaaggttcttttagtaatttaggcaattgtataatgatataaaaataaaatatttgagctaatagtaaaagtataattacgataaaagcattcgccttaggaaaggctataacatatgctgcagcgactaaagaaaatggtgcacaaattgtcgatgtgttcggtttgattgacgtctgcaatggaaatgcttttaatcgcttgaaaactataggtaagacaatacaagtagctacaaagccatatattactgttaattgacctatgaaaaaatatccgctaacgggtgctgtcaatcctgcgatagcaataccaataaaaagtacagtccacgaaggataaacattctcaagtgaaaaatcttttaaataattaattgaaaaaataatcatatgcgtcataattcccacaaggcataaaatccaaataggcgttattaaattattgataaatgttatattactaaaaaatgtatttaaatatgtagtacctaaaaagccagacatgaaaaatgttgtgaacactgatgaaactagagggctgtttaattgttctttcacattattaaaatatttgagcatagtacataaaaggtgaatccaaatcaagaaagcaaaaattccgcaaacagcgtttaaagtaagagataagtcttttaatagattacccaggcctaataatcctaagactagtcctgacgttactagaggtgctttttgaagtctcatgatttacaacctttcttatgtgattttcttcactaattatatcatgatagctatggcctattaataagaagagtgtgtactattacgtttttagagtatgtatattggattgatagacacataattgacatttaaatctcaatattaatgatatttgaggtatgctttgctacctaaatatggaatatgtggaaaagtatttatttaatttaaatgatgattgaagatttacaagggggtgtacaaaatgagaaatcaaattcaaaaactattagacagtgatttgagcagtttacaaatatcgaaacaaacaggagtgccacaaagcacaatacacagaatgagaaaaaaagaaagatcattagacaatatgtcattgaaaaacgctgaactactttataaatttgccaatggtatatttagtaatgaaaattaagaagaataattagtgagttaaataattagaaaaccacgtctcgatgggcgtggttattttttagatgtatataattataatcataggatttcgggtccctgaaaagtccctaaaattttgaatagtatcaaaatctataggaataatataataataaaaatctctaagcatgcaaatggtgagtgttaaaaatcttggtgtagttttggtgtagttcaggtgcagtatagatgaaatttgagcgtaaaattacttaattaaaaatgtgtaaacatgtatcaaccgcgtgtcaattgtgtgtcaaaaaattctaaaatgaataagcaagcttgttttaattactgtattttcggggcttatgcgggatacgttttggtgacgcatcatactatattactgaaattcaaaacaaaaagagccccgtaatcacggaactcttttgtttggtgatgcgtataaaaatacctataaacgtcctgggagggattcgaacccccgaccgatggcttagaaggccattgctctatccagctgagctaccaggacacgtttaacaacacaagaattattatatctaaatgaacttaaattagcaataccttgtaaataaaaaatgtttatatttttcactattatagagctatttatctaaaaaggttcaataagacttaaatacgaattcaggcaacttaattgtgttaaatacagttttgaatgcctaactgtatatcttttctctttaaaatacagttaagtacattataagatgttgtgcggataaacaaactaattgcatcaaatttattttaaaataacaacaacaaaacgttaagcgaataacatttcggtgatttaaaagctacgcacgtttttgttatcttcaaatttaaattttaaggagtgttttcaatggaaggtttatttaacgcaattaaagataccgtaactgcagcaattaataatgacggcgcaaaattaggcacaagcattgtgagcatcgttgaaaatggcgtaggtttactaggtaaattattcggattctaatttcaatatgttatgtaagtaataagtattatttcaaaggtgagggagagatttaaatgactggactagcagaagcaatcgcaaatactgtgcaagctgcacaacaacatgatagtgtgaaattaggcacaagtatcgtagacatcgttgctaacggtgtgggtttactaggtaaattattcggattctaatataataactaatattctttaaaataaactgggtgagcatactttaatgttatgcactcagtttattttatttgcagaaatttgagcctctgttaagatttagatacatagacaatataggagatggggaaattgggatataaaaatattttgatagactttgatgatacaattgttgatttttatgatgcagaagaatgggcgtttcactatatggcgaatgtttttaatcataaagcaacaaaggatgattttttaacatttaaaaaaatcaatcaccaacattgggaagcttttcaacaaaataaattaacgaagtctgaagtattatcagaacgatttgtgaattactttaaacatcatcaaatggaagttgatgggcatcgtgcagatgtgttatttagaaatggattagcagaagctaaagttaaatactttgatcaaacattagaaacaattgtcgagttatcgaaaagacatgatctatatattgttactaatggtgtaaccgaaacgcaaaagagaaggttaaatcagacgccgttgcataaatatattaaaaagatatttatatctgaggaaacaggatatcaaaaacctaatccggaattttttaattatgtttttaatgatattggtgaggatgaaagacagcgctcgattatagttggagattctttaacatctgacattctaggtggaatcaatgcgggtatagctacttgctggtttaattttagaggatttgatcataatccaggaattatagccgattatgaaattaattcatggaaacaactaaatgatattgtacgttaagacaaataatttgaaaatgatttacttatattagctaagaaagtaattgtaaaaaagacactacgaaaagatgcattttcatgctcgtagtgtcgaatattattatcttatggtttccacaataagacatcatgtccctctatatttttagcttccacatctgtaaatccatgatgtaaaaagaaatccttagaatcatttctgccaatggctttaattggcatattgaaactctttgcaaaatcaatcaattctgaagcgtaccctctgttttgatattttggtaatacttctaacttccataataatatataatcttcaaaatctgggaagtagatttcttcgacatcacctttttttagtaatgccattctagctcctaattgatctccgacaaatatgccataaaatggtgaatctgaacttgcatcaatcatttgaccgtttaactcattgaccatgtataagtctttgttgccaaacgctctaaagttttcgaataattcgtcagttttgtaattaatttcaagacgtttgatttcactcatatttatctaccccttatttgtttactactattattatacattaaaccacttgtgtttttcattgatttgaaaatgtaaaacaatgaatattataaattttccatgattaaattgattttcaagccgtaaaattgtcaatcaccggtatagactttatactatagtttgtaatcgcgtacttaaggagaaaaaacatggactgtaaagtagttagtttaaatgaaaaagatcagtttataccaaaaataaagagcagtgaccctgtaataacaggattatttcaatatgatgcagctcaacaaactagttttgaaaaaagaatgtctaaagaaaataatggaagagaagcggcattagcgaatgttattcgtgaatatatgagtgatttaaagctttcaagtgaacaagaattaaacatacaacatttagctaatggttcaaaagttgtgattggtggacaacaagcagggcttttcgggggaccattgtatacattccataaaatattttcaatcattactttatctaatgaattaacggatacacataagcaacaagtagtaccagttttttggattgcaggagaagatcatgatttcgatgaagtgaatcatacatttgtttataacgaaaatcatgggtcgctgcataaggttaaatatcatactatggagatgccagagacgactgtctctagatattatcctgataaggccgagttgaaacaaactttaaaaacgatgttcattcatatgaaagaaactgttcatacacaaggtctactggagatttgtgacagaattattgaccaatatgactcgtggactgatatgtttaaagcactactgcatgagacatttaaagcatatggcgttctatttatagatgcgcagtttgagccgttaagaaaaatggaagcgcctatgtttaaaaagattttgaaaaaacatcagttgctcgatgatgcttttagagcaacacaacaacgtactcaaaatcaaggtttgaaggcgatgatacaaacagatacaaatgttcatttattcttacatgatgaaaatatgcgtcaattagtttcgtatgatggtaagcattttaaattaaataaaacagataagacatatataaaggaagaaattataaatattgcagaaaatcaacctgaattattttctaataatgtagtgacaagaccattaatggaagaatggttatttaacacggtggcatttattggaggaccgagtgaaattaagtactgggctgaactaaaagatgtatttgaactatttgatgttgaaatgcctatcgtgatgccaaggcttagaattacttatttaaatgaccgtattgaaaaattactttcgaaatacaatattccattagaaaaagtgttagtcgatggtgttgaaggagaaagaagtaagtttattagagaacaagcatcacatcaatttattgaaaaggtagaaggtatgattgaacaacagcgtcgtctaaaccaagacttattagatgaagtggcggggaatcaaaataatattaaccttgtgaataaaaataatgaaattcatatacaacagtatgattatttgttaaaacgttatcttttaaacattgaaagagaaaacgacatcagtatgaagcaatttagagaaattcaagaaacactccatccaatgggaggattacaagaaagaatatggaatccacttcaaattttgaatgattttgggatagatgtgttcaagccctccacctatccaccactttcttacacttttgatcatattattataaaaccttaatataccaagggtttagcccgatttatcttaatgataaatcgggcatttttttgttttttaaaataaatttcacaaattttgtataaatagtggtggatagtggggagatgtggtaaattatatataaggtgaggtgataaaaaatgttcatgggagaatacgatcatcaattagatacaaaaggacgtatgattataccgtccaagtttcgttatgacttaaatgagcgttttattatcacaagaggccttgataaatgtttattcggttacacgctagacgaatggcaacagattgaagagaaaatgaaaaccttacctatgacaaaaaaagacgcacgtaagtttatgcgtatgttcttctctggtgctgttgaagtagaacttgataagcaagggcgtattaacatccctcaaaacttgaggaaatacgctaatttaactaaagaatgtacagtaatcggtgtttcaaatcgtattgagatttgggatagagaaacttggaatgatttctatgaagaatctgaagaaagtttcgaagatattgctgaagatttaatagattttgatttttaaaatggaggaattgaagtgtttcatcatatcagcgttatgttaaacgaaaccattgattatttaaatgtaaaagaaaatggtgtgtacattgactgtacgctaggtggagcgggacatgccctttatttactaaatcaattaaatgacgacggaagattaatagcaatcgatcaagaccaaactgcaattgataatgctaaagaagtattaaaggatcatttgcataaggtgacttttgttcatagcaacttccgtgaattaactcaaatattaaaaaacttaaacattgaaaaagtagatggaatttattacgacttgggtgtttcaagcccacaactcgacattccagaacgaggattcagttatcaccatgacgcaacattagacatgcgtatggaccagacacaagaactaacagcatatgaaattgttaacaattggtcatatgaagcgttagtgaagattttttatcgctatggcgaggagaaattttcaaaacagatagctcgaagaatcgaagcacatcgcgaacaacaaccaataacaacaacattagaattagttgacattataaaagaaggtattcctgcaaaagcaagaagaaaaggcggacatcctgcaaaacgagtatttcaagcactacgaattgcagtaaacgatgaattgtcagcttttgaagattcaatagaacaagcgattgaattagtgaaagtagacggcaggatttcggtaatcactttccattctttagaagatcgtttatgtaaacaggtgttccaagaatatgaaaaaggtccagaggtaccaagaggattaccagttataccagaagcatatacacctaagttaaagcgtgttaatcgtaaaccgattaccgctacagaagaagatttagatgacaataacagagcacgaagcgcgaaattacgtgtagctgaaatacttaaataaggagcaattaataatggctgtagaaaaagtgtaccaaccatatgacgaacaagtttataatagtataccgaagcaacaaccacaaactaagcccgaaaagaagactgtttcgagaaaagtggttgtacaattaactaaatttgaaaaagttttatacataactttgattactgtaattgctatgttaagtatttatatgctatctttaaaaatggatgcgtatgatacgcgaggaaagattgcagatttagattataaaatagataaacaatcaagtgaaaacagtgctttacaatctgaaatcaaaaagaattcttcttatgaacgcatatacgaaaaggctaagaaacaggggatgagccttgagaacgataatgtaaaggtagtgcgtagtaatggcgaagcaaaaaattaaaattaaaaaaaataaaataggggcagtcctacttgttggtttattcggactgctcttttttatattggttttaagaatttcatatatcatgattactggacattctaatggtcaagatttagtcatgaaggcaaatgaaaagtatttagttaagaatgcacaacaaccagaacgaggaaagatatatgatcgtaatggtaaagtgctagcagaagatgtagaaagatataaacttgttgcagtaatagataaaaaggcgagtgccaattctaaaaaacctaggcatgtagttgataaaaaagagactgcaaagaaattatctacagtcattgatatgaagccagaggaaattgaaaagagacttagtcaaaagaaagccttccaaattgaatttggacgcaaaggaacaaatttaacgtatcaggacaaattgaaaatagagaaaatgaatttgcctggtatttctttattgcctgaaacagaacgcttttatccaaatggcaattttgcatcacacttaattggtagagctcagaaaaatccggatactggtgaacttaaaggtgcgcttggagttgaaaagatttttgatagttatttaagtggatctaaaggatcattgagatatattcatgatatttggggatatattgcaccaaatactaaaaaagagaaacagcctaaacgtggtgatgatgtccatttaacaatcgattcaaatattcaagtatttgttgaagaggctttagatggcatggttgaaagataccagccgaaagatttatttgcggttgtcatggatgccaaaactggagaaattttagcatacagtcagcgaccaacatttaatcctgaaactggtaaagactttggtaaaaagtgggcaaatgacctttatcaaaacacatacgagcctggatcaacatttaaatcatatgggttagcagctgctattcaagaaggtgcttttgatcctgataagaaatataaatctggacatagagatattatgggttcacgcatttcagactggaatagagtcggttggggtgaaatcccaatgtcactcggatttacttattcatctaatacattgatgatgcatttacaagatttagttggtgcagacaaaatgaaatcttggtatgaacgatttggatttggaaaatcaactaaaggtatgtttgatggagaagcacctggtcaaattggatggagtaatgagttgcaacaaaaaacgtcatcatttggtcaatcgacaacagtaacacctgttcaaatgttacaagcgcaatcagcgttctttaatgatggtaatatgttaaaaccatggtttgtgaatagcgttgaaaatcctgttagtaaaagacaattttataaaggtcaaaaacaaatcgcaggcaaaccaataacaaaagatactgctgaaaaagttgaaaagcaattggatttagttgtgaatagtaagaagagtcacgctgcaaactatcgtattgatggttatgaggtcgaaggtaagactggtacagcacaagtcgctgcacctaatggtggtggatacgttaaaggtccaaacccatattttgtaagttttatgggtgacgcgccgaagaaaaatcctaaagttattgtatacgctggtatgagcttggcacaaaaaaatgaccaagaagcttatgaattaggtgttagtaaagcgtttaaaccaataatggaaaatactttgaaatatttaaatgtaggtaaatcaaaagatgacacatctaatgcagagtatagtaaagtgccagatgttgaaggtcaagacaaacaaaaagctattgataatgtgagtgcaaaatcattagaaccagttactatcggttctggcacacaaataaaagcgcaatctataaaagcagggaataaagtcttacctcatagtaaagtactgttattaacagatggagacttaactatgcctgacatgtcaggatggacgaaagaagatgtcattgcttttgaaaacctaacaaatattaaagtgaatttaaaaggtagcggttttgtgtcccaccaatcaattagtaagggacaaaaacttactgaaaaagataaaatagacgtagaattttcatcagagaatgtagacagcaattcgacgaataattctgattcaaattcagatgataagaagaaatctgacagtaaaactgacaaagataagtcggactaacaagaatggctacattaaataagggtgtattgtcactatttgtttttactaaagtaatgctgtgatagaaaacaacatcttcatttaatctttataaataagtgttgatagagaattttaaggtagacgaggtcagattaacttgtttgttataggcaaactttttatactggcctcttatgccgtaaaaaagaaaattataaattttgattacaactttgtttatttaattgaaaaattgataatatattagtggttaaaaaagtctggattaagaagaggagatagttatgatttttgtatatgcgttattagcgctagtgattacatttgttttggtacctgttttaatacctacattaaaaaggatgaaatttggtcaaagtattcgagaagaaggtccacaaagccatatgaagaagactggtacaccaacgatgggtggactaacatttctattaagtattgtgataacgtctttggtggctattatatttgtagatcaagctaatccaatcatactgttattatttgtgacgattggttttgggttaattggttttatagatgattatattattgttgttaaaaagaataaccaaggtttaacaagtaagcagaagtttttggcgcaaattggtattgcgattattttctttgttttaagtaatgtatttcatttggtgaatttttctacgagcatacatattccatttacgaatgtagcaatcccattatcatttgcatatgttattttcattgttttttggcaagtaggtttttctaatgcggtaaatttaacagatggtttagatggattagcaactggactgtcaattataggatttacaatgtatgccatcatgagctttgtgttaggagaaacggcaattggtattttctgtatcattatgttgtttgcacttttaggatttttaccatataacattaaccctgctaaagtgtttatgggagatacaggtagcttagctttaggtggtatatttgctacgatttcaatcatgcttaatcaggaattatcattaatttttataggtttagtattcgtaattgaaacattatctgttatgttacaagtcgctagctttaaattgactggaaagcgtatatttaaaatgagtccgattcatcatcattttgaattgataggttggagcgaatggaaagtagttacagtattttgggctgttggtctgatttcaggtttaatcggtttatggattggagtgcattaagatgcttaattacacagggttagaaaataaaaatgtattagtcgtcggtttggcaaaaagtggttatgaagcagctaaattattaagtaaattaggtgcgaatgtgactgtcaatgatgggaaagacttatcgcaagatgctcatgcaaaagatttagaatctatgggcatttctgttgtaagtggaagtcatccattaacattgcttgataataatccaataattgttaaaaatcctggaataccttatacagtatctattattgatgaagcagtgaaacgaggtttgaaaatcttaacagaagttgagttaagttatctaatctctgaagcaccaatcatagctgtaacgggtacaaatggtaaaacgacagttacttctctaattggagatatgtttaaaaaaagtcgcttaactggaagattatccggcaatattggttatgttgcatctaaagtagcacaagaagtaaaacctacagattatttagttacagagttgtcgtcattccagttacttggaatcgaaaagtataaaccacatattgctataattactaacatttattcagcgcatctagattaccatgaaaatttagaaaactatcaaaatgctaaaaagcaaatatataaaaatcaaacggaagaagattatttgatttgtaattatcatcaaagacaagtgatagagtcggaagaattaaaagctaagacattgtatttctcaactcaacaagaagttgatggtatttatattaaagatggttttatcgtttataaaggtgttcgtattattaacactgaagatctagtattgcctggtgaacataatttagaaaatatattagcagctgtgcttgcttgtattttagctggtgtacctattaaagcaattattgatagtttaactacattttcaggtatagagcatagattgcaatatgttggtactaatagaactaataaatattataatgattccaaagcaacaaacacgctagcaacacagtttgccttaaattcatttaatcaaccaatcatttggttatgtggtggtttggatcgagggaatgaatttgacgaactcattccttatatggaaaatgttcgcgcgatggttgtattcggacaaacgaaagctaagtttgctaaactaggtaatagtcaagggaaatcggtcattgaagcgaacaatgtcgaagacgctgttgataaagtacaagatattatagaaccaaatgatgttgtattattgtcacctgcttgtgcgagttgggatcaatatagtacttttgaagagcgtggagagaaatttattgaaagattccgtgcccatttaccatcttattaaagggtgtgagtattgatggatgataaaacgaagaacgatcaacaagaatcaaatgaagataaagatgaattagaattatttacgaggaatacatctaagaaaagacggcaaagaaaaagatcaaaggctacacatttttctaatcaaaataaagatgatacatctcaacaagctgattttgatgaagaaatatacttgataaataaagacttcaaaaaagaacaaagcaatgaagaaaataacgattctgcttctagtcatgcgaacgataataatatcgatgattctacagactctaataatgaaaatgaggattatagttataatcaagaaattgacgaccaaaatgaatcgaatggaattgcagtcgataacgaacaacctcaatcagctcctaaagaacaaaatagcgactcgaatgatgaggaaacagtaacgaaaaaagaacgaaaaagtaaagtaacacaattaaagccattaacacttgaagaaaagcggaagttaagacgtaagcgacaaaagcgaatccaatacagtgttattacaatattggtattgttgattgctgttatattaatttacatgttttcaccacttagtaaaattgcgcatgtaaatataaatggaaataatcacgttagtacttcaaagataaacaaagttttaggtgttaaaaatgattcaagaatgtatacgtttagtaaaaaaaatgctattaatgatctcgaagaggatccattaatcaaaagtgttgagatacacaagcaactaccaaacacattaaacgtagatatcacagaaaatgaaattattgctttagtgaaatataaaggtaaatatttacctttattagaaaatggtaaattgcttaaaggttcaaatgatgtcaaaattaatgatgcacctgtcatggatggtttcaaaggtacaaaagaagatgatatgattaaggcgttatctgaaatgacacctgaagttagacgatatattgccgaagtgacatacgccccaagtaaaaacaaacaaagcagaattgaattgtttacgacagatggacttcaagtaatcggtgatatttcgacgatatctaagaaaatgaaatattatccgcagatgtcacaatcattatcaagagatagttcgggtaaactaaaaacacgaggctatattgatttatcagtcggtgcttcatttatcccataccgtggaaacacgtctactcaatcagaaagcgataaaaatgtgactaaatcatctcaagaggaaaatcaagcaaaagaagaattacaaagcgttttaaacaaaattaacaaacaatcaagtaagaataattaaaaaattttgatattgtctatgtttatagttcacaagccattcaacgtattgtaaactaaagatagtgtattttttaatagtaatttgtcaggaggtgcctatctatggaagaacattactacgtaagtattgatattggatcatcaagcgtaaaaacaatagtaggcgagaaatttcacaatggtataaatgtgataggtacaggacaaacctacacgagcggtataaaaaatggtttaattgatgattttgatattgcgcgtcaagcaatcaaagacacaattaaaaaggcatcaatcgcttcgggtgttgatattaaagaagttttcctgaaattacctatcattggaacggaagtttatgatgaatcaaatgaaatcgacttttatgaggatacagaaatcaacggttcacatatcgaaaaagtattagaaggtattagagaaaaaaatgatgtgcaagaaacagaagtaattaatgtgttcccgattcgttttatagtcgataaagaaaatgaggtttcagaccctaaagaattaattgccagacattcattaaaggttgaagcaggcgtaattgctattcaaaaatcgattttaattaatatgattaaatgcgttgaagcatgtggtgttgatgtattagatgtttattctgatgcatataactacggttcaatcctaacagctactgaaaaagagttaggtgcatgtgtcattgatattggtgaagacgttacgcaagttgctttttatgaacgcggtgaattagtagatgctgattctatcgaaatggcagggcgtgatattacagacgatattgcacaagggttaaacacttcttatgaaactgctgaaaaagttaaacaccaatacggtcatgcattctatgattctgcttcagatcaagatatcttcactgttgaacaggttgatagtgatgaaacagtacagtatactcaaaaagatttgagtgactttattgaagcgcgtgtagaagaaatattcttcgaagtatttgatgttttacaagatttaggattaacaaaagtaaatggtgggtttattgtaactggtggatctgcaaacttacttggcgtaaaagaattattatcagatatggtaagtgaaaaagttagaattcacacgccatcacaaatgggaattagaaaacctgaattttcttcagcaatttctacaatttctagtagtatcgcttttgatgagttattagattatgttacaattaattatcatgataatgaagaaactgaagaagatgttattgatgtgaaagacaaagataacgaatctaaattaggcggatttgattggtttaaacgtaaaacaaacaaaaaagatactcatgaaaatgaagtagagtctacagatgaagaaatttatcaatcagaagataatcatcaggaacataaacagaatcatgaacatgttcaagacaaagataaagaagaaagtaaattcaaaaaactaatgaaatctctatttgaatgattattggccaataaaactaggaggaaatttaaatgttagaatttgaacaaggatttaatcatttagcgactttaaaggtcattggtgtaggtggtggcggtaacaacgccgtaaaccgaatgattgaccatggaatgaataatgttgaatttatcgctatcaacacagacggtcaagctttaaacttatctaaagctgaatctaaaatccaaatcggtgaaaaattaacacgtggtttaggagcaggagctaatcctgaaatcggtaaaaaagctgcagaggaatctcgtgagcaaattgaagatgcaatccaaggtgcagacatggtatttgttacttctggtatgggtggcggaactggtactggtgcagcaccagtcgttgctaaaattgcaaaagaaatgggcgcattaactgttggtgttgtaactcgtccatttagttttgaaggacgtaaacgtcaaactcaagctgctgctggagtagaagctatgaaagctgcagtagatacattaatcgttataccaaatgaccgtttattagatatcgttgacaaatctacgccaatgatggaagcatttaaagaagctgacaacgtgttacgccaaggtgtacaaggtatctcagacttaatcgctgtttctggtgaagtaaacttagactttgcagacgttaagacaattatgtctaaccaaggttctgcattaatgggtattggtgtttcttctggtgaaaatagagcggtagaagctgctaaaaaagcaatctcttctccattacttgaaacatctatcgttggtgcacaaggtgtgcttatgaatattactggtggcgagtcattgtcattatttgaagcacaagaggctgctgatattgtccaagatgctgcagatgaagacgttaatatgattttcggtacagttattaatcctgaattacaagatgagattgttgtaacagttattgcaactggttttgatgacaaaccaacatcacatggtcgtaaatctggtagcactggattcggaacaagcgtaaatacttctagcaatgcaacttctaaagatgaatcattcacttcaaattcatcaaatgctcaagcaactgatagtgtaagtgaaagaacacatacaactaaagaagatgatattcctagcttcattagaaatagagaagaaagacgttcaagaagaacaagacgttaatcggttaatatatatacacaaataattcaacacaaatcatcagataacatatctgatgatttttttactaatttttagaacatgtagaaggacatttaagtttttcgaagtcattaaaagtgtttaagtatcgtgtcaaaattaagtcaaaaattatttgcgcaacattttaactttaaacataaatgttatattatataattattaactttgtacagttagacgaagataatttaaatgaaatgatggtgacaatcgagtgaatgataattttaaaaagcaaccgcatcatttaatatatgaagaattattacaacaaggtattactcttggtattacaactagaggcgatggtttaagtgactatcctaaaaatgcttttaatatggcgagatatattgatgatcgcccatataatattactcaacatcaattgcaattagctgaagaaattgcgtttgatagaaaaaaatgggtgtttcccatccaaacacatgaaaataaagtcgcttgtataacaaaggatgatataggcacaaatatagacactttaactgatgcgcttcatggtattgatgcgatgtacacatatgatagtaatgtcttattaacgatgtgttatgcagactgtgtaccagtatatttttatagtacaaaacatcattttattgcattggcgcatgcagggtggcgtggtacctatactgaaattgtaaaagaagtgctaaaacatgtgaactttgatttgaaagacttacatgttgttattggaccatctacatcaccaagttatgaaattaatgatgatattaaaaataaatttgaaacattgccaattgatagtgcaaactatattgaaactagaggacgagatcgtcatggtattgatttgaaaaaagccaatgctgcattattaaataattatggtgttcctaaagaaaatatttatacgacagcgtatgctacatctgaacatttagaattatttttctcttatcgattagaaaaaggtcaaacaggacgcatgttagcattcattggtcaacagtaaacaaggaggagatatgcttgcgtgtgaaagataatttacaacaaatctcaacacaaattaatgacaaaagtgaaaaaaataatttttcaacaaaaccaaacgtgattgcagttacaaaatatgttacaatagagcgagctaaagaagcgtatgaggctggaataagacattttggtgagaatagattggaaggcttttttcaaaagaaagaagcattaccatcagatgcggtgatccattttataggatcattacaatctcgaaaagttaaggacgttataaacgacgtagattatttccatgctttagatcgattgagcttagccaaagaaattaacaaacgtgcagaacataaaattaaatgtttcttgcaagtgaacgtttcgggagaagcttctaaacatggtattgctttagaagatgttgatcagtttatagatgatcttaaaaaatatgacaaaatcgaaattgtaggtttaatgacgatggcaccattgacagatgatgaagcatatattagatcgttatttaaacagttacgtttgaaaaaagaagaaatacaacgactcaatttagaatatgcgccttgtgatgaattatcaatgggaatgagtaatgactatcttattgcagttgaagaaggtgcaacgtttgttagaattgggactaaacttgtaggagaagaggagtgagccacttggctttaaaagatttatttagtggattttttgtaatagatgatgaagaggaagtagaagtacctgacaaacaacagcaggtaaatgaagcgccagcaaaagagcagtcacaacaaacgacaaaacaaaacgcaatcaaatcagtccctcaaaaatctgcatcaagatatacaacaacgtcagaagaaaggaataaccgtatgtctaattattcaaaaaataattcacgtaatgttgtaactatgaacaatgctacaccaaacaatgcatcacaagaaagttcaaaaatgtgtttattcgaaccacgtgttttttcagatacacaagatattgctgatgagcttaaaaaccgccgagcgacacttgtcaatttacaacgtattgataaagtatcagcgaaaagaattattgattttttaagcggtactgtttatgcaatcggtggagatatccaacgtgtaggtactgatattttcttatgtacgcctgataatgtggaagtagctggaagcattacagaccatattgaaaatatggaacattcattcgactaaggagttaacatatggatataaatgtgctagctacaatatttaaatttatcctttttgttgttgaaatttattatttcggcatgattatatatttctttacatcttgggtaccaagtattagagaaactaaggtaggttattttttagcgaaaatatatgaacctttcttacaaccatttagaaagataattccacctattggaattatcgacatatcatcaatcgctgcaattatcgttttagtattattccaaagagggttactccaaatctttaattggattttaattcaattacaataaattaagcgacataacgaggcaagggtacatgatactttagcctcgtttttgatatgtatttttctgaatataagggcaatagatggtattttataatttttttaaggtagggattaacatagatatttatcaacactttagacaggaagaatacgaattaattgatcagctaacggataaatgtgatcaagcggaacagcattatgcaccagtattaacgcattttttagatccaagagggcaatatatattggaagtgatttgtggcagttatgaagatttaatcgtatctttttatggcgggctaaatgctgaaagaaaaagagcaatcatttcgccgaactattatgaacctaaagaaagtgactttgatttaactttaatggaaatagattatcctgaaaaattcgtcactttaaaacatcaacatattttagggacattaatgtctttaggtatcgaacgcgaacaagttggagatataattgtgaatgaacgaattcaatttgttttgacaagtagattggaatcatttattatgttagaattacaacgtattaaaggcgcatcagttaaactttatactattccagtaacagatatgatacaatctaatgagaattggaaaattgaaagtgcaacagttagttctttaaggttagatgttgttattaaagaaatgatacgtaaatcacgtacgattgcgaaacaactaatcgaaaaaaaacgtgttaaagtgaatcacactattgttgattcagcagattttcaattacaagcaaatgatttaatatccatccaaggttttggtagagcacacattactgacttaggtggtaaaactaaaaaagataaaacgcacattacctatagaacattattcaaatagtaatgatttaaggaggataacaaatgccttttacaccaaatgaaattaagaataaagagttttcacgtgtaaagaatggtttagaacctactgaagttgctaattttttggagcaactaagcactgaaattgaacgtcttaaagaagataaaaaacaacttgaaaaagtaatcgaagagagagatactaatattaagtcttatcaagacgtgcatcaatctgtaagtgatgctttgatacaagctcaaaaagctggtgaagaaactaagcaagctgcagagaaacaagctgaagcgattatagctaaggcagaagcgcaagctaatcaaatggttggtgacgcggtagaaaaagcacgccgtttagcattccagactgaagatatgaaacgtcaatcaaaagtatttagatcgcgtttccgtatgttagttgaagcgcaattagacttattaaaaaacgaagattgggattacttgttgaattatgatttagacgctgaacaagtgacgcttgaaaatattcatcatttacatgaaaatgatttaaagccagatgaagttgcagcaaatgcacaaaataatgcatcaaatacatcagacaataatcaacaatccaatgattcagaaacaactaagaagtaagaattaaataaagacagacgcgtaatatacatttaacttttcacagcgaattaggtaatggtgagagcctagtaaaagcatgtatgttatatcactggctttttaatatttaaataatgtaatgagagaactctaagttgagttaataagggtggtaccgcgagcaatcgtcccttttaatttaacttagagttttttaaatttttaaggagtgaaaaaaatggattacaaagaaacgttattaatgcctaaaacagatttcccaatgcgaggtggtttaccaaacaaggaaccgcaaattcaagaaaaatgggatgcagaagatcaataccataaagcgttagaaaaaaataaaggtaacgaaacattcattttacatgatggcccaccatacgcgaatggtaacttacatatgggacatgccttgaacaaaattttaaaagactttattgtacgttataaaactatgcaagggttctatgcaccatacgtaccaggttgggatacacatggtttaccaattgaacaagcattaacgaaaaaaggtgttgaccgtaagaaaatgtcaacagctgaattccgtgagaaatgtaaagaatttgctttagaacaaattgaattacagaaaaaagattttagacgtttaggtgttcgtggtgactttaatgatccatatattacattaaaacctgaatacgaagctgcacaaattcgtatttttggagaaatggcagataaaggtttaatttataaaggtaaaaagccagtttattggtctccttcaagtgagtcttcattagcagaagcagaaattgaatatcacgataaacgttcagcatcaatttacgttgcatttgacgttaaagatgacaaaggtgtcgtagatgcagatgctaaatttattatctggacaacaacgccatggacaattccatcaaatgttgcgattaccgttcatcctgaattaaaatatggtcaatacaatgtaaatggcgaaaaatatattattgcagaagccttatctgacgctgtagcagaagcactggattgggataaagcatcaatcaaattagaaaaagaatacacaggtaaagaattggagtatgttgtagcacaacatccattcttagatagagaatcgttagtgattaatggtgatcatgttactacagatgctggtacaggttgtgtacatacagcaccaggtcacggggaagatgactatattgttggtcaaaaatatgaattgccagtaattagtccaattgatgataaaggtgtatttactgaagaaggcggccaatttgaaggaatgttctatgataaagctaataaagccgttactgatttattaacagaaaaaggtgcactattaaaattagactttattacacatagctatccacacgactggagaacaaaaaaacctgtaatcttccgtgctacaccacaatggtttgcctcaatcagtaaagtaagacaagatattttagatgcaatcgaaaatacaaacttcaaagtaaattggggtaaaacacgtatttacaatatggttcgtgaccgtggcgaatgggttatttctcgtcaacgtgtttggggtgtaccgttaccagtattttatgctgaaaatggtgaaattatcatgacgaaagaaacagtgaatcatgttgctgatttatttgcagaacacggttcaaatatttggtttgaaagagaagcgaaagacttactaccagaaggatttacacatccaggcagccctaacggtacatttactaaagaaacagacattatggacgtttggtttgattctggttcatcacaccgtggcgtgttggaaacaagaccggaattaagtttcccagcggatatgtatttagaaggtagtgaccaatatcgtggttggttcaactcttctattacaacttcagttgctacaagaggagtatcaccttataaattcttactttctcatggttttgttatggacggtgaaggtaagaaaatgagtaaatctttaggtaatgtgattgtacctgaccaagtggttaaacaaaaaggtgctgatattgcgagactttgggtaagtagtacggactatttagctgatgttagaatttctgatgaaattttaaaacaaacatctgatgtttatcgtaaaatcagaaatacattaagatttatgttaggtaatattaatgatttcaatcctgatacagatagcgttcctgaatcagagttattagaagtggattgttacttgctaaatcgtttacgtgaatttactgcaagtacaattaacaactatgaaaactttgactacttaaatatttatcaagaagttcaaaactttatcaatgttgagttaagtaatttctatttggattacggtaaagatattttatatattgaacaacgtgattctcatatccgtcgtagtatgcaaacagtgttatatcaaattttagttgatatgacgaagttgttagcaccaatcttagtgcatacagctgaagaagtttggtctcatacaccacatgttaaagaagaaagtgttcacttagcagacatgcctaaagttgtagaagtagatcaagctttattggataaatggcgtacatttatgaatttacgtgatgatgtgaaccgtgcattagaaactgctcgtaatgaaaaagttattggtaaatcattagaagctaaagttacgattgctagtaacgataaatttaatgcatctgaattcttaacttcatttgatgcattacatcaattatttatcgtgtcacaagttaaagttgtagataagttagatgatcaggcaacagcttatgaacatggtgatattgtcatcgaacatgcagatggtgaaaaatgtgaaagatgttggaactattcagaggatcttggtgctgttgatgaattgacgcatctatgtccacgttgccaacaagttgtaaaatcacttgtataattgaaattgtataaagtactcatacagatgatataaattaaagctctcttcataatcatgttgtagtttttgttgacatgatgaagagagtttttttgcgaataaaaaatgaccgagttactggttatatgtgtaaaaaaatgtgtgatttactaaaataaaaattattcaggaatgatacaaattctctgaagcttataaatgcgttatagttgctattctcaattatgttcgcgataattttaagtaaaagtaagcacagatattgaatttgataggagttaattgaatgtatcataacagtaacgcaaactttgtaaatggtatcactttaaatgtaagagataagaatgaattaaagccattttatgaggacgtattaggattaaatattataaatgagacattaacatcgatacaatatgaagtaggtcaaaataatcatgtcattacacttgttgaattacaaaatggacgtgaacctttaatgtcagaagcgggactgtttcatatcgcaattaaactacctcaaattagtgatttagctaatttactaattcatttaagcgaatatgatattccagttaacggaggtatacagcctgcttcgttatcattattttttgaagacccggaaggaaacggttttaaattttatgttgataaagacgaagcgcaatggacgaggcaaaatgatttagtaaaaattgatattagaccattaaatgtaccgagattagtgagtcatgcaacaaaattgttatggttaggtattccagatgacgctattataggtgcattgcatattaagacaattcatttatcagaggtaaaagactactacctcgattattttggattagagcaatcggcatatatggatgattattcaatatttttagcatcgaatggctattatcaacatttggccatgaatgattgggtatcagcaacgaaacgtgtagaaaattttgatacgtatggattagcaattgttgactttcattatcctgaaacaacacatttaaatttacaaggtccggatggtatctattatcgctttaatcatatcgaagttgaagattagtatatactttgaatggacgaaccatataatgaatcgtttttaatgatctttttatacaagttatgaaggagcttgagacattaagttcttaggcaatgtaaaaagctgatttctattaattatttgatagaaatcagcttttttgatatgtattttataatgtacagctcgttgagctgctattttccttatattaagtgccattaatacaaaacctagctctcgtttaactttatttattcctcgaactgacattcgagtgaaacccaaaatagccttcataaatccaaaaacaggctctacatcaatttttctttgactatagatttttttcgtttctggttcagaaagcttttgattaatttgggctttaaagaattcccaattataattcttcataattttcttattggatttcgaatttggcttcatacattgatgtctcaaagaacatgatgaacagtcatcacattcatatagtttgaagtcacgtttaaaaccatatctatcattacggtatgcatatcctttaaaacctattcttttgttattaggacatataaattcatcattaagttcgtcatatttccaattttgagtgttaaaaatggaattaaagttctagtatctgtcgggttttgaaataggtcgtaggataaaacaaattgagaatttgtcgctatttgtaaattgtatcctggcttaagttggccatttttcatatggtcttccttcattctcataaaagtagcatcatgatcagcgctgcttactttaaaatatcgttctccatttttaaatgttgaacttctttacgtaatttaatcagctctttttcttcatttgattagttatcttggtgattgaatgtacccgtgttttgatgttgctttatccattttcctaacgcctaggaatgaaatcatactcgcgtataatttcattcctaggcttaccattttcatataatctaaccatttgtaacttaaactctgaactaaatgattttctttctcttgtcataataaaatagcctactttcttaaattaacaatatctattctcatagaatttgtccaattaagtgtagacgattcatgtcttatttttttaaagtatttaaaagtaaaattacatgttaatacgtagtattaatggcgagactcctgagggagcagtgccagtcgaagaccgaggctgagacggcaccctaggaaagcgaagccattcaatacgaagtattgtataaatagagaacagcagtaagataatttttaattagaaaatatcttactgctgtttttttagggatttatgtcccagcctgtttcctaatttttaatgtcatcttaaatatgataaatgaataattaagttcatatttaatgtcaaaacatagtagtttatcaagtattgagttagtaacattagatttaatgtaatatgcttactttttttattagcaggtgtaagctataatataaagagttgtcttatggacgattgattggaggaacgaaaatgcacaaaaaatattttattggcacttccattttaatagcagtatttgtcgttatatttgaccaagttactaaatatattatagctactacaatgaaaattggagattcatttgaagtgataccgcactttttaaacataacatcacatcgaaataatggtgctgcatggggaatattgagtggaaaaatgacatttttctttattattaccattattatattaatagccttagtatatttctttattaaagatgctcaatataatttgtttatgcaagttgctattagtttactttttgcaggtgcacttggaaactttattgatagagttttaacaggagaagttgttgactttattgatacaaatatttttggttatgattttccaatatttaatatcgcagattcaagtttaacaattggtgtaatattaattattattgccttattaaaggatacttccaataaaaaggagaaggaggttaagtaatggagacttatgaatttaacattacagataaagaacaaacaggtatgcgtgtagataatttgctgcctgaattaaatagtgattggtctcgtaaccagatacaagattggattaaagcaggtttagtcgttgcaaacgataaagttgttaaatctaattataaagtgaaacttaatgatcatatagttgtcactgaaaaagaagtggttgaagctgatattctacctgaaaatttaaatttagatatttattatgaagatgacgatgttgcagttgtatataaaccgaaaggcatggtagttcatccatcaccaggtcattataccaatacattagttaatggtttaatgtatcaaattaaaaatttgtcgggtattaatggagaaattcgtccaggtattgttcaccgtatagatatggatacttctggtttattaatggttgctaaaaatgatattgctcatcgtggacttgtagaacaattaatggataaatctgttaaaagaaaatatatcgctttagttcacgggaatattcctcatgattacggtacaatcgatgcgccaattggtagaaacaaaaatgatcgtcaatctatggctgttgttgatgatggtaaggaagcagtgacacattttaacgtactagaacattttaaagattatactcttgttgaatgtcaacttgaaacaggacgtacgcatcaaatccgtgtgcacatgaaatatattggtttcccattagttggtgatccaaagtatggaccgaaacagacattggatattggtggtcaagctctacatgctggacttattggattcgaacatccagtaacaggtgaatatattgaaagacatgctgaattaccacaagactttgaagatttattagatacaattcgaaaaagagatgcataattgtgtcgtgctataattacgataacattattatgtaaactataagtgtttatcgtttttgttttttaaaaatgaaaacacattataaaatagattaaggttaacatttttactgagaatggttaatttttcaatatagattgacaaagcgcctgattagtattatccttataacagtttaagtacaacataaagagtctttaattgagcgtccagagagacgtcaaagacatgaaaatatagatatatactaaaatgaatcttaacactttcacatatgcaagattaagtagtaatactacgattcttctatgtaaaaagggtgattgtatatactaaacctcatgtcgatattaaagacatgaggttttttgtttctaaattttgaaagggtgagaatatgtctgaacgtatcataatggatgatgccgcaatacaacgtacagtaacgagaatcgctcatgaaattttggagtataacaaaggtactgataatttaattcttttaggtatcaaaacaagaggtgaatatttagcgaatcgtatacaagataaaattcatcaaattgagcaacaacgtatacctacaggaacaattgatattacatactttagagatgatatagagcacatgtcatcacttacgacaaaagacgcaatagacatcgacacagatattacagataaagtagtcatcattattgacgatgtgctgtatactggtcgaacggttcgtgcttcacttgatgctattttgctaaatgctagacctattaaaattggtttagctgccttggttgatcgaggacatcgtgagttaccaattcgagcagattttgttggtaaaaatatacctacttctaaagaggaaacggtaagtgtctatttagaagaaatggatcaaagaaatgcagttataattaaataataccccttttaattcagtacgagagactgaaaaaggtgggggagttgaatgataaataagttttcatatgcttgtttatctaataataccctcatgttcgacaactataagtcaatttctatggacgaaaatgacttgtagcaacttgtcacactttttgtctctttacatatactgatgtaaagagatttttttattatcggaggaaatgaatattatgcaaaatgatgaaatgtttgaacgaacagtaaaacctgtactagatgtaaatgaaaaaccacaaccagcgcaatgggcgtttttaagcttacaacatttatttgcgatgtttggcgcaacagtactagtaccattcttaacaggattaccaatatccgcagcgttactagcttcgggaatcggtacattactttatatcttaataacgaaggcacaaataccagcatacttgggatctagctttgcatttatcacaccaattatcacgggattaagtacgcatagcttaggagacatgcttgtagcattattcatgagtggtgttatgtacgtcatcattgggattctaatcaaattaagtgggacagcatggttaatgaaattattaccaccagttgttgtaggaccagtcatcatggtaattggtttaagcttagcgcctactgcagtcaatatggcaatgtatgaaaatcctggagatatgaaaggttacaatatcagtttcttaattgttgcaatgataaccttgcttgtaacaatagccgttcaaggattttttaaaggattcctatctttaattccagtacttgtaggtattatcgtaggttatgtggtagcgatttttatggggattgtgaaatttgatgcaattatgtcagcaaaatggatagatttccctcatatttatctgccatttaaagattatgtaccttcatttcacttaggacttgtacttgtaatgattccgattgtgttcgtaacagtaagtgaacatattgggcaccaaatggtactgaataaaatcgtaggtagaaacttctttgaaaagccaggacttgataaatcaatcattggtgatggtgtttctacaatgtttgccagtattattggtggaccaccaagtacaacatatggtgaaaatatcggtgtattagcgattacaagaatatacagtatttacgtcattggtggtgcagcagttatagcaattgttttagcattcattggtaagttcactgcattaatttcttctatacctacaccagttatgggaggagtatctatattacttttcggtattattgcagcaagtggcttaagaatgttagttgaaagcaaagtagattttgcgaacaatcgaaatttagttatagcttcagtaattttagttgtaggtatcggtaatttagtatttaacttaaaagaaattggtatcaaccttcaaattgaggggatggcattagctgcactttcaggaattattttgaacttaatcttacctaaagagaaaaaacaaaacaattaagatttacaaattaaggagggcgcttttatgaatcatttattatcaatggaacatttatctacagatcaaatatacaaacttatccaaaaggcaagtcaatttaaatctggtgaacgtcaactaccaaactttgaagggaaatatgtcgcaaatttattctttgaaaattctactcgaacaaaatgtagttttgaaatggcagaacttaagctagggttaaaaacgattagctttgaaacatcaacatcatctgtttcaaaaggtgaatctttatatgacacatgtaaaactttagaaagtattggctgtgatttattagtcattagacatccgtttaataactactatgaaaaattagcgaatattaacatcccaattgcgaatgctggtgatggtagtggacaacatccaacacaaagtttgcttgatttaatgacgatatatgaagaatatggatattttgaaggcttgaatgtattgatttgtggagacattaaaaattcacgtgtcgctcgtagtaattaccatagtttaaaagcattaggtgcaaacgtaatgtttaatagcccaaatgcttggattgatgattctttagaagcaccttatgtaaatatagatgatgttatagaaacagtagatatagttatgttattaagaattcaacatgaaagacatgggcttgcagaagaaactagatttgcagcagatgattatcatcaaaagcatggcttaaatgaagtgcgctataacaaattacaagaacatgctattgttatgcatccggcacctgtgaatagaggagtagaaatacaaagcgatttagtagaagcttcaaaatcaagaatttttaagcaaatggaaaatggtgtttacttaagaatggcagtcattgatgaattattaaaataggtaaggggacgaaaatgatgaaattaattaaaaacggtaaagtattacaaaatggcgaattacaacaagcagatattttaattgatggtaaggtaattaaacaaattgcacctacaattgaaccaagcaatggtgttgacatcatagatgcgaaaggtcactttgtgtcacctggatttgtcgatgttcatgttcatttacgcgaacctggtggtgaatataaagagacaattgaaactggtactaaagctgctgctagaggtggatttacaactgtatgtccaatgcctaatacaagaccggtaccagattctgtagaacattttgaagctttacaaaaattaatcgatgacaatgctcaagtacgtgtattaccttatgcttcaattacaacacgtcaattaggtaaagaattggttgatttcccagcactagtaaaagaaggtgcctttgcgtttacagatgacggtgtgggagtacaaactgcaagcatgatgtatgaaggcatgattgaagctgcaaaagtaaacaaagctatcgtagcacactgtgaagataattcattaatctatggtggtgcaatgcatgaagggaaacgcagtaaagagttaggtataccaggtattccaaacatttgtgaatctgttcaaatcgcaagagatgtactattagctgaagcagcaggttgtcattatcatgtatgtcatgtttctactaaagaaagtgttagagtcattcgtgatgctaaacgcgcaggcattcatgttacagctgaagttacaccacaccatttattgttaacagaagatgatattcctggtaacaatgccatttataaaatgaatccaccattgagaagtactgaagatagagaggctttgttagaagggttactagacggtacaattgactgtatcgcaacagatcatgcaccacatgcacgtgatgaaaaagcacaaccaatggaaaaagcaccattcggaattgttggtagtgaaacagcattcccattattatatacgcattttgtaaaaaatggtgattggacattacaacgattagtagattacttaacaattaaaccatgtgagacatttaatttagaatacggcacattaaaagaaaatggttatgcagatttaacaatcattgatttagatagtgaacaagaaattaaaggtgaagatttcttatcaaaagcagataatacaccatttatcggctataaagtttatggaaatccgatcttaacaatggttgaaggcgaagttaaatttgagggggataaataatatgcaaagcaaacgttatctagtgttagaagacggttctttttacgaaggttaccgtttaggatctgataacttaactgtaggagaaattgtatttaatacagcgatgacaggttatcaagaaactatttcagatccatcatatacaggtcagatcattacttttacgtatccattaatcggtaattatggtatcaatagagacgattttgaatcattagtacctacattaaacggtattgtagtgaaagaagcgagtgcgcatccaagtaattttagacaacaaaagacacttcatgacgttttagaattgcatcaaattccaggtattgcaggtgttgatacaagaagtattacgcgtaaaattcgacaacacggtgtgttaaaagctggttttactgatcgaaaagaagatattgatcaacttgtcaaacatttacaacaagtagaattacctaaaaacgaagtagaaatcgtttcgactaaaacaccgtatgtttcgacaggtaaggatctaagtgtcgtacttgtagactttggtaagaagcaaaatattgttcgagaattaaacgtcagaggttgtaacgtcacagttgtaccatatacaactactgccgaagaaattttagcaatggctccagatggcgttatgctatcaaacggaccaggtaatcctgaagttgtagaatgtgcgattccaatgattcaaggaattttagggaaaattccgttctttggtatctgtctaggacatcaactttttgcattatctcaaggagcaagctcatttaaaatgaagtttggtcatcgaggtgcgaaccatccagttaaaaatttagagactggaaaagttgatattacgagtcaaaaccatggatatgcaatagatatagattcgttaaaaagtactgatttagaagttactcatcttgcattaaatgatggtactgtagaaggtttaaaacataaaacattaccagcattttctgttcaataccatcctgaagcaaatccaggaccgtcagattcaaactatctatttgatgattttgtagcaatgatgactaattttaaggaaaaggagcgtcatatcaatgcctaaacgtaatgatatcaaaacaattttagtaatagggtctgggccaattatcataggtcaagcagctgaatttgattatgctggaacacaagcatgtctagctttaaaagaagagggataccgagttattcttgtaaattcaaatccagcgacaatcatgactgataaggaaattgcggataaagtatatatcgaaccgttaactcatgattttatagcgcgaattatacgtaaagagcaacctgacgctttacttccaactttaggtggtcaaacaggtttaaacatggcgattcaactacacgaaagtggtgtgcttcaagataataacgtccaattactaggaactgagctaacatcaattcaacaagcagaagaccgtgaaatgtttagaacattaatgaatgatttaaacgttcctgtgccagagagtgacattgtaaatacagtagaacaagcctttaaattcaaagagcaagtgggatacccgctaattgttagaccagcatttacgatgggtggtaccggaggcggtatttgtcataatgatgaagaattacatgaaatcgtctcaaatggtcttcattatagtccagcaacgcaatgtttattagaaaaatctatcgcaggttttaaagaaatcgaatacgaagtaatgcgtgataaaaacgataatgccatcgttgtatgtaacatggaaaatattgatccagttggtattcatacaggcgattcaattgttgtagctcctagccaaacattatcagatgttgagtatcaaatgttacgtgatgtttcattaaaagttattcgagctttaggtatcgaaggtggttgtaatgttcaattagcattagatccgcattcattcgattattatattatagaagtaaatccgcgtgtatcacgttcatcagcgttagcttcaaaagcaacaggatatcctattgcaaaattagctgctaaaatcgcggttggtctaacattagatgaaatgttaaatccaattacaggaacatcttatgcagcgtttgaaccaactttagactatgtgatttcaaaaataccaagatttccttttgataaatttgaaaaaggagaacgagagcttggcacacaaatgaaagcaacaggtgaagttatggccattggtcgaacttacgaagaatcattgttaaaagcaattcgatcacttgagtatggtgtgcatcacttaggattaccaaatggtgaaagcttcgatcttgattatattaaagaacgtatttcacaccaagatgatgaacgattatttttcatcggcgaagcaattagaagaggcacaacattagaagaaattcataatatgactcagattgattacttcttcttacacaagttccaaaacattattgatattgagcatcaactaaaagaatatcaaggtgatttagaatatcttaaatatgcaaaagattatggatttagtgataaaacaatagcgcatcgctttaatatgacggaagaagaagtatatcaattgcgtatggaaaatgatattaaacctgtttacaagatggttgatacttgcgcagctgaatttgaatcttcaacaccatattattatggtacatatgaaactgaaaatgaatccataattactgacaaagaaaaaatcttagtattaggctctggaccaattcgaatcggtcaaggtgtagaatttgactatgcgacagttcacgccgtttgggcaattcaaaaagcagggtacgaagcgataattgtgaataacaatccagaaacagtatcaacagacttctcaatttctgacaaattatactttgaacctttaactgaagaagatgtgatgaatatcattaatttagaaaaacctaaaggtgtcgttgtacaatttggaggacaaacagcgattaatttagcagacaaattggctaaacatggtgttaaaatacttggtacttcactagaaaatctaaatcgtgctgaagatagaaaagaatttgaagcactattaagaaaaattaacgtgccacagccacaagggaaaacagctacatcacctgaggaagcattagcgaatgctgcagaaatcggatatccggttgtagtcagaccttcttatgtattaggtggtcgcgcaatggaaattgtagacaatgacaaagagttagaaaactatatgacccaggctgtaaaagcgagtccggaacatccggtattagtcgatagatatttaactggtaaagaaattgaagttgatgcgatttgtgatggagaaacggtcattattccaggaattatggaacatattgaacgtgctggtgtgcatagtggtgactcaatcgctgtatatccgccacaaactttgacagaagacgagttagcaacgcttgaggactatactataaaattagctaaaggtttaaacatcattggcttaatcaacattcaattcgttatagctcacgatggtgtgtatgttttagaagtgaatccacgttctagtagaacggtaccattcttaagtaaaattactgatattccaatggcacaattagctatgcgagcaatcattggggaaaaactaacagatatgggttatcaagaaggggttcaaccatatgctgagggtgtatttgtgaaagcaccggtatttagttttaataaattgaaaaatgttgatattactttaggacctgaaatgaagtctacaggtgaagtgatggggaaagatactacattagaaaaggcgttattcaaagggttaacaggtagtggtgttgaagttaaagatcacggtacagtattaatgactgtcagtgacaaagataaagaggaagttgttaaattggcacaacgcttaaatgaagttggctataaaattttagcaacgtctggaacagccaataaattagctgagtatgacatacctgcagaagtagtaggcaaaattggtggcgaaaatgatttattaacacgtattcaaaatggtgatgttcaaatcgttataaatacaatgactaaaggtaaagaagtagaaagagatggcttccaaattagacgtactacagttgaaaatggtattccatgtttgacatctttagatacagctaatgccttaacgaatgtaattgaaagtatgacatttacaatgcgtcaaatgtaaatcaatcaaactgtatcggtggggctgtaattaaccatttacttaaagaagtttatattacagcctcattattttaatgaatttcttaacgtaaagggagacatatatgatgaaagatttaccaattattgcattagattttgaatcaaaagaaaaagtaaatcaatttttagatttatttgatgaatcattattcgtaaaagtaggtatggaacttttttatcaagaaggtcctcaattaattaatgagataaaagaaagaggccatgatgtatttttagatttaaaactgcatgatattcctaatacagttgctaaggcgatggaaggactagctaaattgaatgttgatctggtaaatgttcatgctgctggtggcgtaaaaatgatgtctgaggccattaaaggattaagaaaacataatcaacatacaaaaattattgctgtaacacagcttacgtcaacaacagaagacatgttacgacacgaacaaaatatacaaacatcgattgaagaggccgttttaaattatgccaagttagcaaatgcagctggtttagatggcgttgtttgttcacctcttgaaagtcgtatgttgactgaaaagttaggtacatcatttttaaaagtaacaccaggcattagacctaaaggtgcatctcaagatgaccaacaccgtattacgacaccggaagaagcaaggcagcttggttcgacgcatattgtagtcggtagaccgattacacaaagtgacaatccagtcgaaagttatcataaaattaaagaaagttggttagtataatggctaaagaaattgcaaaatcattattagatattgaagctgtaacattatcaccaaatgatttatatacatggagttcaggcattaaatcaccgatttactgtgataaccgtgttacgttaggttatcctttagttcgaggcgcaatccgcgatggtttaattaacttaattaaagaacactttcctgaagtagaagttatttctggtactgcaacagctggtattccacatgcagcttttattgctgaaaaattaaaattaccaatgaattatgttcgttcatcaaataaaagtcatggtaagcaaaatcaaatcgaaggtgctaaaagcgaaggtaaaaaagtagttgtgatagaagatttaatttcgacagggggatcttcagtcacagcagttgaagccttaaaacaagcaggtgcagaagtattaggtgttgtagctatctttacttacggtttgaaaaaagcagatgatacatttagcaatattcaactacctttttacactttaagtgattacaatgaattaattgaagtagctgaaaatgaaggtaaaatttctagtgaagatatccaaacattagttgaatggagagacaacttagcataatatagacactagaaggaggaattcaacaaatgaatgacaaaacatctaatgatttatatgggaagataaaacattgtaacgaatttatcaatcattcaaatgattccaatctatctagtagtcacgatgtcgacgaaagttcaacgaagcaaaagcatataaaaaataaaacaactataaatcataatgatgatttatttaaacatgtaaaggatatattacgtaaacaaggacaaatttaaaaacaaaaaagctatagtgtttaatatcaggggctgcttaaccgcatccgaatattacaaacactatagcttttattatataaaaaaattattagcggataattaactttattaaaatccaaccaattaagaatacgagtaataggactaatactggaatcacataatgtaacataacgtccctcctttaacttaattttaattgtaatcaaatttgacaataagtcaaaacattagtacctatgataagtatcatttattaacatatgtatcatatttttaatcttgcgtaatttttatcgttaactatgtgatttaatcaacaggctaataagacatttgtcattcgtgcacataacggtacgacgcgcttttgtcattttaattatgttaagataatagtagttatagaagttcaatctataggaggcatagcatggatattccaaaaattacgacatttttaatgtttaataaccaagctgaagaagctgttaaactatacacaagcttatttgaagatagtgagattataacaatggctaagtatggtgaaaatggacctggtgatcctgggactgtacaacactcaatatttacattaaatggacaagtattcatggcgattgatgctaatagtggcacagaattaccaatgaatcctgcgatttcattatttgttacagtaaaagatactattgaaatggaacgactatttaatggattaaaagatgaaggtgccattttaatgccaaaaacgaatatgccaccatacagagagtttgcttgggttcaagataagtttggagtaagttttcaattagcattacctgagtaaaaggattcgtacagcgttgaatgataaagaaacactttttccctttatacttaattttctcaagtttaccgtcaaatataatatttttatatttcaaatcaaaggtatttagtataacattgttcataggcgcattatctcctttagttatttgtttaggcacttttaattatagggataattgcgctttttttatattcaaaatcaaaaaatcggacagatgaaaagtaaaatactttttccatcagtccgatttattatagaaccataaatcaatagtagttctttattattttagtttcactcatttttaaaatcacaaagataatttgtaacttaaatgatgattcgttattaaaaaacacgatacttcgtttcaatgaacgcattaaattaaaaaaaacacctcgcaaaagaaagtaggcctttcttatggtgaggtgtttatttgtcgacaacttgattatgattgtttcattttttgaatatgttcataatcaggtgtagcatacaaagttttttgattgtcatatgttacaaacccaggctttgcacctgatggtttgtgcacatttttaattaaggtgtaatcaacaggtatttgtccagaattaccagcttttgaaaaatatcctgctaacatagccgcttccttgattgtcgtatcacttggtgcatcattaaatataacgacatgtgaacccggaatatcttttgtgtgtaaccatgtgtgagtttttttagcttttttatttgttaaataatcattttgcttgttattcttgccaacatatatatcgtcgccatcagttgatacataatgttgtaattgaatctgctctttctttttcttagtttgatttttacgctgtttcataaagccttgttctgctaattcatctctaatttcatcaatgtcatggacagaaatatgatgtaattgttgttcgattgttgaaaaataatctatattgtctttcgtcaattgaatttgatgttgtaattcacgttctctcgttttcatacgattatattgtttataataatattgagcatttgcagatggggattttgtaggatttaaaggaatgacaacttcttcattcgtataataattcaatgccgtcacttctttatcgccttgcttaattcgatatatattagcagtgatcaattcaccatataactgttcagtatctttatttttagactgctcatattcttcaatcaacttcgctaatttattttgatatttgtgcaactgctgttgaacaaatcgaactaaatcattcgcacgttgtttaacgcgttcacgttcgccacgcgcatcataaaaacgatcaagtaaatcatttaatgaatcgtacgtaactgtatcatcattaaattgatttaactttataaaatagaaatcctctttacctgtttcatgatttttatgaaaaataggagtaggtggtaacttggtttctgccattacttcatcgaatgcttctggtaatgttgatgaagtcataaattgacgacgattaacgatttcattcgtaattaaagggctaaatccttcaaactgattcaataattgtttagcaatattacctgcgttaaaatcgatatatttcaacacctctgcacctgtaatatcatacggattcattttgtgctgagtaggtggtgcttcataattaaaacctggcattactgtacgatagtgattcgtatttggtgttaagtgtttaaatccttcaattattttgcgattttcatctactaaaattaagttactatgtttacccataatctcaaggatgacagttcggtaaatagtatcgccaatttcatctttactctttatatcgatttcaatgcgacgatcattaccaatttgcttaatcgattcgataataccaccttctaagtgttttctaaaaacacgcgcaaacatgggtggattaaatggattatcatatttttttgtagtcaattgcaatcttgaaaagtttggatggattgacaataacaattgatggttttgtctattttgacgtacaaccattagtatcgtgtcattatcaggttgattgattttgtgaacgcgtcctgttgttaaaaattgtagagactcaaccattttctttgtaaataagccatcataagccataatttatcttccaccttcttcatatcattcgtttcattttaacatgattgtaacttttcggtatagttattgaatcatacattatgccacacattttacattatctaaaagttcgcaattcaatttatttaattaaaattaatcgtgcaatataacgatattgttagacctaatagaaattatggcatgcaatttcaaatatgctatacaatataaagaacaatgtgatatcatatttaaataatagaagattagcttagagaggtcgtaaggcatggataatgaaaaaggattgttaatcgttttatcaggaccatctggagtaggtaaaggtactgttagaaaacgaatatttgaagatccaagtacatcatataagtattctatttcaatgacaacacgtcaaatgcgtgaaggtgaagttgatggcgtagattacttttttaaaactagggatgcgtttgaagctttaattaaagatgaccaatttatagaatatgctgaatatgtaggcaactattatggtacaccagttcaatatgttaaagatacaatggacgaaggtcatgatgtatttttagaaattgaagtagaaggtgcaaagcaagttagaaagaaatttccagatgcgttatttattttcttagcacctccaagtttagatcacttgagagagcgattagtaggtagaggaacagaatctgatgagaaaatacaaagtcgtattaacgaagcacgtaaagaagtcgaaatgatgaatttatacgattacgttgtagttaatgatgaagtagaacttgcgaagaatagaattcaatgtattgtagaagctgagcacttaaaaagagagcgcgtagaagctaagtatagaaaaatgattttggaggctaaaaaataatgttaaatccaccattaaaccaattaacgtcacaaattaaatcaaagtatttaattgcaacaactgcagcgaaaagagcgcgtgaaattgatgaacaacctgaaactgaattattaagtgaatatcattcatttaaaccagttggtagagcgttagaagaaattgctgacggtaaaattcgccctgttatttcaagcgattattatggtaaagaatagtttcgaccattaaaaatatgtgaagcaagacgtacatcaaatacgtcaaggcatatccaaatcaaacgcacctatgtaggtgtgtttttttagtttatccaatgattgatgttataataatactaaatttgtatctataaaaaagtaatgagcatttgtgcgcatatgatgatgtaaagcgtaaatgtcatagtgatatttaagggagattgaatatgaagaaaatattattagccgttacaggtggcattgcggcatataaagcgattgatttgacaagtaagttaacacaatctggatatgaagttcgcgttatgttaacgaatcacgcacaaaaatttgtgacaccattagcatttcaagcaataagtcgaaatgctgtttatacagatacttttatagaagaaaatccttcagaaatacagcatattgcattaggtgattgggcagatgcaatcattgttgcacctgcaacggcaaatacaattgcaaaattgagtgtaggtattgctgatgatttggtgacatcaacgttgctagcaacagagacaccgaaatttattgcgcctgctatgaatgtgcatatgtatgaaaataaacgtacgcagcaaaatattaatattttaaaagaagatgggtatcattttatcgaaccaggaagcggatttctagcatgtggttatgttgctaaaggacgtatggaagaaccgcttcaaatcgtttctgttattgatgctcattttcaaaatagtaatcgtttagctaatagttcatttcaagataaacgcgcattggtcacagctggaccaactattgaagttatcgatccagtcagatttgtatccaatcgttcttctggaaaaatgggttatgcaatagctgaagcattgcgaaatcgaggagctatcgtgacgttagttgctggtcctacaacactagaggatccaaaagatattgaagttattcatgttcaaagtgctgaagaaatgtttgaacaagtgacaagccgatttgacgaacaagatattgttgtaaaagcagcagccgtatctgactatacaccggttgatgtattagaacataagatgaaaaagcaggatggtgatttgtcagtatcttttaaacgtactaaagacattcttaaatatttaggtgaacataaaacatcacagtatttaataggctttgcagcagagactgaagatattgaaaattatgcacaacaaaaattacgcaagaaaaatgcagatgtgattatttcaaataatgttggggatatgtctatcggatttagttctgatgataatgaattgacaatgcattttaaaaataatgaaaaggtaaatatcaagaagggaaaaaaagtagtattagctgcacaaattttagatgaactagaaactaggtggcaataatgatagcgaaagtcatagtcgatgtcgcgtcgaagagcgttgactataaatttgattatataattcccgaacaactcgaatctgtcatccaacctggtgtgcgtgtgattgtaccttttggaccaagaacgattcaaggttatgtaatggaagtaacagcagaacctgatacacaacttgacgtttcgaagttaaaaaaaatcatagaagtgaaagatatacaacctgaattaacatcagaattaatagctttaagtgagtggatgggttcaactcatgtcattaaacgtatttctatgctagaagtgatgcttccgagtgctattaaagcgaagtataaaaaagcatttaagatgaaagatgacatagagctaccttcagctttattacaaaaatttgataagcatggttactattattataaagatgcgcaaaaaaataatgatattcaattgcttatgaagttgttaaaagatgatatcgttgaagaaaaaacgattctcacacaaaatataactaaaaaaaccaagcgtgctgttcgtgtcattgaagggtatcatcctgatgaagtattagctaagttggagaaagttattaaacaatacgatttgtatgcttacttgtctgaagaacaacataaaacaatatttttaactgatattgaggatatgggcttttcaaaatccagtttagatggacttatcaaaaaaggttatgttgaaaaatatgacgcggttgttgaaagagacccatttaaagatcgtgttttcgaacaagaatcaaaacagcaattaacagaagaccaatataaagcatatgaagcgattaaagctaaaattgtaagccaagagcaagaaacatttttacttcatggtgtgacgggatcaggtaaaacagaagtatatttacaaacgatagaagatgttttaagccaaggaaaacaggcgatgatgttagttcctgaaatcgctctaacaccgcaaatggttttacgcttcaaacgtcgatttggtgatgacgttgctgtattacattctggcttatctaatggggaacgttatgatgagtggcaaaaaattagggatggtcgtgcgagagtaagtgttggtgcaaggtcaagtgtgttcgcacctttcaaaaatttagggttaatcatcattgatgaagaacatgaatctacatataagcaagaagattatccgagatatcacgctagagaaattgcccaatggcgaagtgaatatcatcactgcccagtcattttaggaagtgcaacaccatgtcttgaaagttatgcacgagctgaaaaaggcgtttatcatttgctatcattaccaaacagagtgaaccaacaagctttacctgaaattgatatagtagacatgcgtgaagaattgagtgaaggtaatcggtcaatgttttcaaaagatttacgtgaagccatacaattaagattagatcgacaggaacaagttgttttatttttaaatcgacgtggttatgcatcgtttatgttatgtcgggattgtggatatgtaccgcaatgtccaaactgtgatatttcattaacgtatcataaaacgacagacttattaaaatgtcactattgtggttaccaagagacgccaccgaatcaatgtccaaattgtgagagtgaacacattcgacaagtaggtactggtactcagaaagttgaagaactattgcaacaagaatttgaagatgcgcgcataattaggatggatgtagatacaacctcaaagaaaggtgcacatgaaaagttattgactgaattcgaaaaaggtaacggtgacattttactaggtactcagatgattgcaaaaggattagattatccaaacattactttagttggtgtgctgaatgcagatacaatgttaaatttacctgattttcgggcgagcgaacgtacttatcaactattaacgcaagtggctggtagagctggtcgtcatgaaaaggcaggtcaagtcatcattcaaacgtataatccagaccattattcaatattggatgttcaaaaaaatgattatttaacattttatcgtcaggaaatggaatatcgtaaattaggaaagtatccaccgtattattatttgattaatttcacaatctcacataaagaaatgaagaaggttatggaagcatcacagcatgttcataaaattttattacagcatttaacagaaaaagcgcttgtactaggtccatctccggcagcacttgcgagaatcaacaatgaatttagattccaaattttagtgaaatataaaagtgaacctggattattacaagccattcaatttttagatgactattaccatgaaaaatttataaaagaaaaattagcattgaagattgatatcgatccacagatgatgatgtaacattactaattattagaaacaagttcagtatgtacgagtatttgaaccagtctttgaatatttactttaagggcagaaaaagggcagaatatacaactgttaaccatttaaattagcagtttatattctgtctttttatatggctttataacttacgtgattttgatttgattagggatttattagtattttcatttatgaattctgattttaatgtaagtaccatacttactgataaacaaaagtactaatgattaagcaaactattttttaatggcaaattgaaatagtgcaaattttacacttataaattaatggttataaactattttatatctatctatgttttaactacttaaattattagacaaaacaatttccttaaattatcaattaaagtatttaaaaatattgattgttaatgtaaaatatcaatataaataagttttttaaatttatgtatgtttatttgattcaaacaaaataacttaagaggagaaagtttatgaaaaagacactgggatgtttacttttaattatgcttttagtcgtagcaggttgttcgtttggtgggaatcataaattatcatcaaagaaatcagaagaatcaaaacaagaaactgtaaaaaaagaatcggaagaagagaaagacccaaaagttgcacactataaaaaaaataaggaaaaaatagcgaaagttaaagcagtacctgttttagaaaagatagaaccatttataaccgaaaagacatttatgaatagcacaggtatgcaagggtggaaagattataaatctttaatgaatcaagtgaagttagcagattataattttacaaaagagtctaaaggtgcttcaatggaagatgttgataagttttttaaaaataaaaaaggtgtaaaacgtaaagaagttactacttatgatggtttgaaacaagttaactattggtatgtagataaaagtggtaaaaaaattggtggttcagacacacctgttttttatgctgaaattttaacgaagtataaagatggaaagttgatttatgcatcagttgaacctggatcatattcatattcaaataagaatgcggtaaatctagataaagttgaagaacttgatgatttaagtatgttctctaatctgaaagatcctaaaccagtaccatatagtgttgctcaaatggaaatatcaagcgtcccagttacaagtgtatctttcgtaacaaagggagggaatcataaagatactaatccagagaaagaacaagttgatatgccacaactagcttatttaactgtttcaccacagctataccatgataaagagcatccagatccgcatataattggattagttgccttgccatacttaaatgcatctagagattttgggaacgcgcattactctgttttaaataatctttcaaaagaaatgaaagagaaattagcgagtcgttcattggaccttgataaatagtgtactacattaaataatcgcaataataatcccgataaacaatcagcattactgcttaacatatagagttcgtaataactaaaactctatgattcgcaaataataaatgattgtcatcgggatttatttttattaatttataaagtgacattaccttgttcatcagcaggtttgaaaacagtaatcactgcactaataattgctaaaatgtgtgggatacctgtccaacagaatattaagtgtagaataccttgcatattcttgccggcataaaatttatgaataccaaaactacctaagaacaatgctaataaaatataaataactttgtttacttgcatttctttccctccagttgaattgcttataatgacattagcttctctgtttattatacccacttttagtttaaacattctagtttaagcattcccaatcatctaaatttcagttattcaatccttacaataaatttaggattacacttcagttgcattgtattattttacgtgtgaaatatacgtaatgaatcacatgacaatctttaaattgaaaaatatacattctatgatgtaaggtcgcatttttaatatatttacgttataatggtttgatgaattttattgaggagtaagagctatggcgattaaaaagttagtaccagcatcgcatcctattttaacgaaaaaagcgcaagcagttataaaatttgatgattcgttaaaaagattattacaagatttagaagatacaatgtatgcacaagaagctgctggcttatgtgcacctcaaattaatcagtcattgcaagtggcaatcattgatatggaaatggaaggattattacaacttgttaatccgaaaattataagtcaatcaaatgaaacaataacagacttagaaggttcaattacattgccagatgtttacggcgaagtgacaagaagtaaaatgatcgttgtcgaaagttatgacgtcaatgggaacaaagttgaactaactgcacatgaagacgtagcaagaatgattttgcatattatagatcaaatgaacggtatcccttttacagaacgtgcggaccgtattttaacagataaagaagtggaggcatattttataaatgactaaaataatatttatgggtacaccagacttttcaacaactgttttagaaatgcttattgcagaacatgatgtcattgcagtcgtaacgcaaccagatcgacctgttggacgtaaacgtgttatgacaccaccaccagttaaaaaagttgcaatgaaatatgatttacctgtatatcagcctgaaaaattaagtggttcagaagaattagaacaattgcttcaattagatgtagatttaattgtaactgctgcttttggacaattattacctgaatcattgttggcattaccaaaacttggcgcaattaatgtacatgcatcattgttaccgaagtatagaggtggtgcaccaattcatcaggcaattatcgatggtgaacaagaaaccggcataacaattatgtatatgattaaaaaattagatgcgggtaatattatttcgcaacaagcaattaaaatagaagaaaatgataatgtcggtacgatgcatgataaattaagtgtattaggggcagatttattaaaagaaactttaccatctattatagagggcacaaatgaaagtgtagctcaagatgatacgcaagcaacatttgcttccaatattcgacgcgaagatgagcgaattagctggaataaaccaggaagacaagtgtttaatcaaattcgaggattatcaccatggccagttgcttatacaactatggatggcactaacttgaaaatatacgatgctgaactcgttgagactaataagataaacgagcccggaacaattatagaaacgactaaaaaagccattattgttgctacaaatgataatgaagctgttgcaattaaagatatgcaattggctgggaaaaagagaatgttagctgccaattatttaagtggtgcgcaaaacacactagtagggaagaaacttatatgatagaaaacgtgagaagtcttgcttttgacacgattcaagatatattaaatgaaggtgcgtatagtaacttgcgtatcaatgaagtgttgtcagaaaatgaattaaatgcaatggataaagctttatttacagaaattgtctacggaaccgttaaaagaaaatatacgttagatttttatttaaagccttttgtgaaaacaaagattaaggcatgggttaggcaattattatggatgagtatttatcaatatgtttatttagataaagttccaaatcacgccatcattaatgaagcagttgaaatagcaaaagaacgaggtggctatcacaacggaaatgtcgtaaatggcattttacgaacaatgatgcgtagtgacttacctgattttaatgaaattgcagatcctaaaaagagaatggcaatcgagtatagtatgccgaagtggattatagatcattgggcaacacattttggtctcgaagaaactgaaacaattttacagtcatttttagaaacgacaacaacaactgtgcgtgccaacctgacgagagcatcattagatgatattattgaaaagttgcaagacgaaggttatgacgttgaaaaagatcatgacttaccttattgtctccatataggaggacaaccaattattcattctcgttcatttaaggatggattcgtttcaattcaagataaaagctcaatgtttgttgcgcacattatgaatgtagaccgacatgatcacgtattagatgcatgtagtgcacctggcggtaaggcttgtcacattgctgaagttttaatgccagaagggcaagttgacgcttcagatatacatgatcacaaaatagacttaattaattttaatataaaaaaattacgattaacaaatattaaagcctttcaacatgatgcgacaaaaccttatgataaaacatacgataagatacttgttgatgcaccatgtagcggattaggtgttatgagacacaagccggagattaaatatactcaaagcaaacaacatattgagtcactagttgatttacagcttgaaatattggaaaatgtaaaaaacaatgtaaaaataggtggcgaaatcgtctattcaacatgtacaattgagcaactagaaaatgaaaacgtgatttatacgtttttgaaaaataataaaaacttcgaatttgaaccgtttcaacatccgataactggagagttggtcaaaacgttacaaatcatgccgcaagactttaattcagatggattctttatctctaagataaaaagaaaggacaattaggaatgataactgctgaaaagaaaaagaagaataaatttcttccaaattttgacaagcaatcaatatattcattgcgatttgacgaaatgcaaaactggctcgttgaacaaggtcaacaaaaatttcgagcgaaacagatttttgaatggttatatcaaaaaagagtagattcgattgatgaaatgacgaacttatcgaaaggcttacgacagcttttaaaagataactttactgttacaactttaacaactgtagtaaaacaagaaagtaaagacggtacaattaaatttttatttgaattacaagatggctatacaattgaaactgttttaatgagacatgattatggaaattcagtatgtgtaacgacacaagtaggttgtcgtatcggatgtacgttttgtgcttctacacttggcggtttaaaaagaaaccttgaagctggcgaaattgtttcacaagttttaacagttcaaaaagcccttgatgctacagaagagcgcgtatctcaaattgtcataatgggtatcggtgaaccatttgaaaattatgatgaaatgatggactttttaagaatcgtcaatgatgataacagtttaaatattggtgcacgtcacattacagtatcaacatcaggtatcattcctagaatatatgactttgcggatgaagatatccaaattaattttgctgtaagcttacacgccgcaaaagatgaagtgcgatcacgcttgatgccaattaaccgtgcatataatgttgagaagttaatcgaagcaattcaatattatcaagaaaaaacaaatcgtcgtgttacttttgaatatggtctgtttggtggtgtgaatgaccaactagaacatgcaagagaattagcacatttaataaaaggcttaaactgccatgttaacttaattcctgtcaaccatgttccagaaagaaattatgtaaaaacggctaaaaatgatatctttaaatttgaaaaagaattaaagagactaggaattaatgccacaatacgtcgtgaacaaggttcagatattgacgcagcttgtggtcaattaagagcaaaggaacgacaagtagaaacgaggtaaagacaaatgctagaggcacaattttttactgatactggacaacatagagataagaatgaagatgcgggtggtattttttataatcaaactaatcaacaacttttagttctgtgtgatggtatgggcggccataaagcaggagaagttgcaagtaaatttgttacagatgagttgaaatcccgttttgaagcggaaaatcttatagaagaacatcaagctgaaaattggttgcgtaataatataaaagatataaattttcagttatatcactatgcacaagaaaatgcagaatataaaggtatgggtacaacatgtgtttgtgcacttgtttttgaaaaatcagttgtgatagcaaatgtcggtgattctagagcctatgttattaatagtcgacaaattgaacaaattactagtgatcactcatttgttaatcatcttgttttaacgggtcaaattacgccggaagaagcatttacacatccacaacgtaatattattacgaaggtgatgggcacagataaacgtgtgagtccagatttgtttattaagcgattaaatttttatgattatttattattaaattcagatggattaactgattatgttaaagacaatgaaattaagcgtttgttagtaaaagaaggtacaatagaagatcatggtgatcaattaatgcaattggcattagataaccattcgaaagataacgttactttcatactcgcggctattgaaggtgataaagtatgataggtaaaataataaatgaacgatataaaattgtagataagcttggcggcggtggcatgagtaccgtttatcttgcagaagatacgatacttaacattaaagttgcaattaaggcgatttttataccacctagagaaaaagaagaaacattaaaacgttttgaacgagaagtacataactcatcacagctatcacatcaaaatatagtaagtatgatcgatgttgatgaagaagatgactgttactacttagtaatggaatatattgaaggtccgactttgtctgagtatatagaaagtcatgggccattaagtgttgacacggcgattaattttacgaatcaaatattggatggcattaaacatgcacatgatatgcgtattgtacatagagatattaagccacaaaatatattaattgacagcaataaaacgttgaaaatatttgattttggaattgctaaagctttaagtgagacgtctttaactcagactaatcatgtgttaggtactgtgcagtacttttcgccagaacaagcaaaaggtgaggcaacggatgaatgtacagatatttattctataggtattgtgttatatgaaatgcttgttggtgaaccaccatttaatggagaaactgcagttagcattgcgattaaacatattcaggattctgtgccaaatgtgacaacagatgtacgtaaggatattccgcaatctttaagtaatgtcattttacgcgctacagaaaaagacaaagcgaatcgttacaaaacaattcaagaaatgaaagatgatttgagtagtgttttacatgaaaatcgagcgaatgaagacgtctatgaactcgataaaatgaaaacgatagcggtacctttgaaaaaagaagatctagcaaagcatattagtgaacataagtcgaatcaacctaaacgtgaaacgacgcaagtacctattgtaaatgggcctgctcatcatcagcaattccaaaagccagaaggtatgttgtatgaaccaaaacctaaaaagaaatcaacacgaaagattgtgctcttatcactaatcttttcgttgttaatgattgcacttgtttcttttgtggcaatggcaatgtttggtaataaatacgaagagacacctgatgtaatcgggaaatctgtaaaagaagcagagcaaatattcaataaaaataatctgaaattaggtaaaatttctagaagttatagtgataaatatcctgaaaatgaaattattaagacaacccctaatacaggtgaacgtgttgaacgtggtgacagtgttgatgttgttatatcaaaaggccctgaaaaggttaaaatgccaaatgtcattggtttacctaaggaggaagccttacagaaattaaaatcgttaggtcttaaagatgttacgattgaaaaagtatataataatcaagcaccaaaaggatacattgcaaatcaaagtgtaaccgcaaatactgaaatcgctattcatgattctaatattaaactatatgaatctttaggcattaagcaagtttatgtagaagactttgaacataaatcctttagcaaagctaaaaaagccttagaagaaaaaggatttaaagttgaaagtaaagaagagtatagcgacgatattgatgagggtgatgtaatttctcaatctccaaaagggaaatcagtagatgaggggtcaacgatttcgtttgttgtttctaaaggtaaaaaaagcgactcatcagatgtcaaaaggacaactgaatcggtagatgtaccatacactggtaaaaatgataagtcacaaaaagttaaagtttatattaaagataaagataatgacggttcaactgaaaaaggtagtttcgacattactagtgatcaacgtatagacattcctttaagaattgaaaaaggaaaaacagcaagttatattgttaaagtagacggtaaaactgtagctgaaaaagaagtcagctatgatgatatttaaatataattgaagtaaatgtaccgaggtttctatttagaagtctcggtatttttatattgagattgcggtagttttaaaatgcttcatgtcatcatatacaggtgagcattgtctatgaattctgtttcactcccgcaatatttatatcatttgaaatgatcatttatatattaattttccagtctttgatataataaatgcagtaaaattaatcgagaggtgccattttgaagacaggtcgaatagtgaaatcaattagtggggtatatcaagtagacgttaatggcgaacgtttcaatacaaaaccacgaggattatttagaaagaaaaaattttcaccggtagttggtgatatagtggaatttgatgtacaaaatattaacgaaggctatattcatcaagtgtatgagcggaaaaatgagttgaaaagaccacctgtaagtaatatagatacactagtaattgtaatgagtgctgtcgagccaaatttttcaacgcaattattagatcgatttttagttattgctcattcgtatcagttaaatgcgagagttttggtgactaaaaaagataaaacaccaattgaaaagcagctcgaaattaatgagttgttgaaaatatatgaaaatattggctatgagactgaatttattggaaatgatgatgatcgaaaaaaaattgtagaagcttggccagcaggacttatagtacttagtggtcaatcaggtgtcggtaagtccactttcttaaatcattatcgtccagaacttaatcttgaaacaaatgatatatcaaaatcattaaatcgaggaaagcatactacaagacatgtcgaactattcgaacgtcaaaacggttatattgcagacacacctggattcagtgctttagattttgatcatatagataaagatgaaataaaagattattttcttgaattaaatcgatatggtgaaacatgtaagtttagaaattgtaatcatatcaaagaacctaattgtaatgttaagcatcaattagagatagggaatattgcgcaatttagatatgaccattatttacaactatttaatgaaatttcaaatagaaaggttagatattaaatgacaaaactatatccatcattattatctgttgattttttggatttacaacatgaattaaaacgacttgaagaagcaggtgtcgacggggttcattttgatgttatggatggtcaatttgtgcctaatatatctattggtttaccaatattagatgcagtaagaaaaggcacaacattacctatagacgtacatttgatgattgaaaatccagaaaagtatattgcatcatttgcagaacatggtgccgatatgatttcaattcatgtcgaatcaacgcctcatatccatcgtgctattcaaatgattaaacatttagataaaaaagctggtgtagtaattaatcctggtacaccaatatcacaaattgaacctattttagacattgttgattatgtactggtgatgacagttaacccagggtttggtggtcaatcatttattgatcaatgcgtagaaaaaatggcgggtcttaatgctattaaaatggaacgtcaattaaactttgatattgaagttgatggaggcgtaaataccgatactgcgaaagtatgtgttgaaaatggtgctacaatgctagtaacaggttcatttttctttaaacaagaggattataaaaaagtcacacaagcattgaaaggttgagtgtatatgcatataaatttattatgttctgatcgacacttgccgcaagatatttgggccaaaagtaatgaaggtaaatggggcggcgttgatagaggtgctttgattttattgaagcatcaaattatcccttttttctcagtgggagactttgattcagtcagtaaagaagaacgccaacttctaacagaacagttacaaatcaaacctgttcaagctgaaaaagctgatacggatttagctttagcggttgataaagctgttgcacttggatttgatagtattacaatttatggtgcaacaggcggacgattagatcacttttttggggcaattcagttattattgaaaaaagcatattataaacatgatgttcatatagaagttatcgatcaacaaaataaaattgaattattgcctaaaggtcaacatacagttgaaaaagataagagttatccgtacatttcatttataccgatgactgatgatgtagaactttctctagcaggttttaaatataatttagctagacaaatgcttaatataggttctactttaactatttcaaatgaaattgagtctttgcaagcgaaagtaactgtacacgatgggttgattttgcaaattagaagtacagatttaaattgagtatatacaaatttgtgaagatttttaataaagtgcatgaggtatctaataaagtgacgtttatagtatagaatttatagcataataatagatgaatcacgctgtaattaatgaagattatggcgtgatttattattgaaaggaaaattgtaggtcctagtacatagatttatgtgccaaaatcgatattgaacccataagtccaatttgatagagaaccattattaaacgttttaaccaaattatattgatagttcgaatttcactatgaaccattatgtattgttttgtaacaaaaaaagaactaagaggttgagctcttagttcttaagtaaatgcgtcctccacataaggtcacattttttatgtgcaatatatttattaaactctagttactttaccagattttaaagcacgtgcagaaacccaaacttttttaggtttaccgtcaactaggattctaactttttgaaggttagcgttccatctacgtttagtagagtttaaagcgtgtgaacgtctgttaccagtcgaagctttacgacctgttacgaaacattgtttacccatatgagtacctcctttaataaatataaatacacataactacttatatacttaactaagatagcatagtttcatttgaaaaacaatgaataattttcacataaaagtcaaaaatactgagttttgtgatataattgtagactgtgaagttatgtagtatgatattttagagaaataagtgaatgaaacatttaaactttttatttaatgatactacatctattaaaagaaaacgcctatagataatcgtcatgagtgtaaattcagtttactcaaaatatgataggtgatttaagcgtaagtcattctgataagttgtaccattgatattttataaaaataatcaatgaaacttaaagcgtttatgactacactaagtggtaaaattttaaaagtgattagggaaaacgaataataaactttgaaatttaggagggacaaagctatgacattagagatttcaaatgattacggtaaaattgatatttcaaacgaagtgattgcttcggttgtaggtggaaaggccgttgaatgttatggtattgtaggtatggcatctagacaacaagttagagatggtattgcggaaatactaggacatgaaaattatgctaaaggcatcaaagtaactgaaaataatggcgtagtggatatagatatgtacattattgtaagttacggtgtgaaaatatctgaagttgccaataatgtacaatcaacagtgaaatatactttggaaaaatcacttaatgtatcagtaaattcaatcaatatatatgtacaaggtgtacgtgtgaataatacaggcaagaaagcttaggaggacaacttgaaatgattagcaaaattaatggtaaattatttgccgatatgattatacaaggggcacaaaatttatctaacaatgcagatttggtagattctttgaatgtgtatccagtgccagatggtgatacaggaacaaatatgaatcttactatgacttcaggtcgcgaagaagtagagaataatttgtcgaaaaatatcggcgaattaggtaaaacattctcgaaaggtttactaatgggtgcaagaggtaactctggtgtcatcttgtcacaattattcagaggattttgtaaaaatattgaaagtgaatctgaaattaattcaaaattgttagctgaaagttttcaagctggtgttgaaacggcatataaagctgttatgaaaccagttgaaggtacaatacttacagttgcaaaagatgctgcgcaagctgcagtagaaaaagcaaataatactgaagattgtatagaattaatggagtacattattgtaaaagccaatgaatcacttgaaaacacaccaaacttattagctgtacttaaagaagttggtgttgttgatagtggtggtaaaggtttgttatgcgtttacgaaggattcttaaaagcgcttaaaggtgaaaaagttgaagccaaagttgcaaagctagataaagatgaatttgtacatgatgaacatgatttccatggtgtaattaatactgaagatattatttatggctattgtactgaaatgatggttcgttttggaaagaataaaaaagcctttgatgaacaagaattcaggcaagatatgagtcaatttggtgattctttattagtcattaatgatgaagaaattgtgaaagttcacgtgcataccgaatatccaggtaaagtgtttaattatggtcaacaatatggtgaattaattaaacttaaggttgaaaatatgagagaacagcaccgtgaagtgattcgaaaagaacagcacacagctaaaccgaaaatggaaacggttgaaacagcaattattactatttctatgggtgaaggtatttcagagatatttaaatcaatgggtgccacacatatcattagtggtggacaaacgatgaatccttctacagaagatatcgttaaagtcattgaacaatcaaaatgtaaacgtgcaattattttaccgaataataaaaatatcttaatggcaagtgaacaagcggcgagtattgttgatgcagaagcagttgttattccaacgaaatctattcctcaaggtataagcgcactattccaatatgatgtggacgcaacacttgaagaaaataaagcgcaaatggctgattcagttaataacgttaaatctggttcattaacgtacgctgttcgtgatacgaaaattgatggcgttgagattaaaaaagacgcatttatgggcttgattgaagataagattgtaagtagccatagtgatcaattaacaacggttactgagttgttaaatgagatgttagcagaagatagtgaaatattgactgtgattattggtcaagatgcagagcaagcagttacagataacatgataaactggatcgaagagcaatatccagatgtagaagtggaagttcatgaaggtggacaaccaatttatcaatatttcttttcagtagaataaaaatttaaaataaaaaactaccaatgataaatcatcagttggtagttttttattttgctattttagtgaggtagcgggttaaaagtatcattctcgagttgctaacaatgtcatgttcaacttagtcatgataaaataaataacatactaaatgatacgtaaaatcaaataaaacataggtgatttattttggcgaaagtaaacttaatagaaagtccatattctcttttacaattaaaaggtataggtcctaagaaaatagaagtattgcaacaactaaatattcatacagtggaagatcttgttctttatttgccaaccagatatgaagataatacagtgattgatttgaatcaagcagaagatcaatctaacgttacgatagaaggacaagtatatacagctccagtagttgcattttttggaagaaataagtcaaaattaactgttcatttaatggtaaataatattgctgtcaaatgtatttttttcaaccaaccgtatttaaaaaagaaaatcgaattaaatcaaactataactgttaaaggtaagtggaatagggttaaacaggaaattactggtaatagggttttctttaattcacaaggtacacaaactcaagaaaacgcagatgttcaattagaaccagtctatcgtattaaggaaggtattaaacaaaagcaaatacgagaccaaattagacaagcattaaatgatgtgacaattcatgaatggttaactgatgaactaagagaaaaatataaattagagaccttggactttactttgaacacgttacatcatcctaaaagtaaagaggatttattacgtgctcgtagaacctatgcatttactgaactgtttttattcgaattacgtatgcaatggctaaatagattagaaaagtcatctgacgaagcaattgaaattgattatgacttagaccaagttaaatcatttattgattgtttaccttttgaactaactgaagcacagaaatccagtgttaatgaaatttttagagatttaaaagcaccaatacgtatgcatcgattacttcaaggtgatgtaggttcaggaaaaacagtagttgctgcaatttgtatgtatgcgttaaaaacggctggttatcaatcagcattgatggtaccaactgaaattttagcagagcaacatgctgaaagtttaattgctttatttggagattctatgaacgttgcgttgttaactgggtcagtaaaaggtaagaaacgaaagatacttttagaacaacttgaaaatggtacgattgattgtttaattggaacccatgcattgattcaagatgatgtgattttccataatgttggtttagtaattacagatgaacaacatcgatttggtgtgaatcaacgccagcttttaagagaaaaaggtgcaatgacgaatgtgttatttatgacagcaaccccgataccaagaacactagcaatatcggtttttggtgagatggatgtgtcttcaattaaacaattaccaaaaggtcgtaaacctatcattactacttgggcaaagcatgagcaatacgataaagttttgatgcaaatgacctcagagttgaaaaaaggtcgtcaagcatatgtcatttgcccgcttatagaaagttctgagcatctcgaagatgttcaaaatgttgtcgcattgtacgagtctttacaacagtattatggtgtttcccgagtagggttattgcatggtaagttgtctgccgatgaaaaagatgaagtcatgcaaaagtttagcaatcatgagatagatgttttagtttctactactgttgttgaagtaggtgttaatgtaccgaatgcaacttttatgatgatttatgatgcggatcgctttggattatcaactttacatcagttacgcggtcgtgtgggtagaagtgaccagcaaagttactgtgttttaattgcatcccctaaaacagaaacaggaattgaaagaatgacaattatgacacaaacaacggatggatttgaattgagtgaacgagacttagaaatgcgtggtcctggagatttctttggtgttaaacaaagtggattgccagatttcttagttgccaatttagttgaagattatcgtatgttagaagttgctcgtgatgaagcagctgaacttattcaatctggcgtattctttgaaaatacgtatcaacatttacgtcattttgttgaagaaaatttattacatcgcagttttgactaattgccatcctgatttgtcaatttaagtgcaacacttcgttaattgagtgatatgacacttgaactatttaaatgtaaagtggtattttaaaaatttataaattttcgactaaataatagctaaataatacagttatttgttgagtcggttaaatagaaagtgttatgatatgtgaggaatgtttaagactaggtactaaaaaatgaggggtgagacgttgaaactaaagaaagataaacgtagagaagcaattagacaacaaattgatagcaatcccttcatcacagaccatgaactaagcgacttatttcaagtgagtatacaaacaattcgtttagatcgcacttatttaaacataccagaattaaggaagcgtattaaattagttgctgaaaagaattatgaccaaataagttctattgaagaacaagaatttattggtgatttgattcaagtcaatccaaatgttaaagcgcaatcaattttagatattacatcggattctgttttttataaaactggaattgcgcgtggtcatgtgctgtttgctcaggcaaattcattatgtgttgcgctaattaagcaaccaacagttttaactcatgagagtagcattcaatttattgaaaaagtaaaattaaatgatacggtaagagcagaagcacgagttgtaaatcaaactgcaaaacattattacgtcgaagtaaagtcatatgttaaacatacattagttttcaaaggaaattttaaaatgttttatgataagcgaggataaaattatggttaaattagcaattgatatgatgggtggcgacaatgcgcctgatatcgtattagaagccgtacaaaaggctgttgaagactttaaagatctagaaattatactttttggtgacgaaaaaaagtataatctgaaccatgaacgaatcgaatttagacattgttctgaaaagattgaaatggaagatgagcctgttagagcgattaaacgtaaaaaagatagctcaatggtaaaaatggctgaagctgtgaaatctggtgaggcagatggatgtgtgtcagcaggtaatactggtgctttaatgtcagctggtttattcattgttggacgtattaaaggtgtagctagaccggctttagtagtaacattgccaacgattgatggaaaaggttttgtctttttagacgttggtgcaaatgcagatgctaaacctgaacacttattacagtatgcgcaactaggggatatttatgctcaaaaaattagaggaattgataatccgaaaatctcattattaaatataggtaccgagccagctaaaggtaatagtttaacgaaaaaatcatatgagttattaaatcaagatcattcattgaattttgttgggaatattgaagcgaagacattaatggatggcgatacagatgttgtagttaccgatggctatactgggaacatggtccttaaaaatttagaaggtactgcaaaatcaatcggtaaaatgttaaaagatacgattatgagtagtactaaaaataaattagcaggtgcaatattgaagaaagatttagccgaattcgctaaaaagatggattactcagaatacggtggttcagtattattaggattggaaggtaccgtagttaaagcacacggtagttcaaatgctaaagctttttattctgcaattagacaagcgaaaatcgcaggagaacaaaatattgtacaaacaatgaaagagactgtaggtgaatcaaatgagtaaaacagcaattatttttccgggacaaggtgcccaaaaagttggtatggcacaagatttatataacaacaacgatcaagcaactgaaattttaacttcagcagcaaacacgttagactttgatattttagagacaatgtttaccgacgaagacggcaaattgggtgaaactgaaaacacgcaaccagctttattgacgcatagttcggcattattagcagcactaaaaaatttgaatcccgattttactatggggcatagtttaggtgaatattcaagtttagttgcagctgacgtattatcatttgaagatgcagttaaaattgttagaaaacgtggtcaattaatggcgcaagcatttcctactggtgtaggaagcatggctgcagtattgggcttagattttgataaagtcgatgaaatttgtaagtcattatcatctgatgacaaaataattgaaccagcaaacattaattgcccaggtcaaattgttgtttcaggtcacaaagctttaattgatgagctagtagaaaaaggtaaatcattaggtgcaaaacgagtcatgcctttagcagtatctggcccattccattcatcgctaatgaaagtgattgaagaagatttttcaagttatattaatcaatttgaatggcgtgatgctaagtttcctgtagttcaaaatgtaaatgcgcaaggtgaaactgacaaagaagtaattaaatctaatatggtcaaacaattatattcaccagtacaattcattaactcaacagaatggctaatagaccaaggtgttgatcattttattgaaattggtcctggaaaagttttgtctggcttaattaaaaaaataaatagagatgttaagttaacatcaattcaaactttagaagatgtgaaaggatggaatgaaaatgactaagagtgctttagtaacaggtgcatcaagaggaattggacgtagcattgcgttacaattagcagaagaaggatataatgtagcagtaaactatgcaggcagcaaagagaaagctgaagcagtagtcgaagaaatcaaagctaaaggtgttgacagttttgcgattcaagcaaatgttgccgatgctgatgaagttaaagcaatgattaaagaagtagttagccaatttggttctttagatgttttagtaaataatgcaggtattactcgcgataatttattaatgcgtatgaaagaacaagagtgggacgatgttattgacacaaacttaaaaggtgtatttaactgtatccaaaaagcaacaccacaaatgttaagacaacgtagtggtgctatcatcaatttatcaagtgttgttggagcagtaggtaatccgggacaagcaaactatgttgcaacaaaagcaggtgttattggtttaactaaatctgcggcgcgtgaattagcatctcgtggtatcactgtaaatgcagttgcacctggttttattgtttctgatatgacagatgctttaagtgatgagcttaaagaacaaatgttgactcaaattccgttagcacgttttggtcaagacacagatattgctaatacagtagcgttcttagcatcagacaaagcaaaatatattacaggtcaaacaatccatgtaaatggtggaatgtacatgtaatatatttgagctaaagcttaagataaagacgcagtaatcaataaattgataagtagattagaggaacgcctgagctaaagctcattgacgcagtggttgactggtcatccaatggagaattgcctgacctagtcaactttgcgggggaaattctaagcaaccaagataaggttccagaatttctccctaagaaacagtaatcaataaattgataactaataagcggaacgcctgagctaaagctcatgcataagaaacagtaatcaataaattgataactgtttctaaaatttctacttgttttttagaatttaaaatgggaaaatataatagtctatgtataggcatttttaaaggaggtgaatcgacgtggaaaatttcgataaagtaaaagatatcatcgttgaccgtttaggtgtagacgctgataaagtaactgaagatgcatctttcaaagatgatttaggcgctgactcacttgatatcgctgaattagtaatggaattagaagacgagtttggtactgaaattcctgatgaagaagctgaaaaaatcaacactgttggtgatgctgttaaatttattaacagtcttgaaaaataataaatcttacatctgggtcgtcagtattgtcgactcagtttttttctttaattatcaatagttttaacgtaaaattaaagatgattcaagagcaacacataaaggagataaaataatgtctaaacaaaagaaaagtgagatagttaatcgttttagaaagcgctttgatactaaaatgacagagttaggctttacttatcaaaatattgatttataccaacaagcattttcgcattcgagttttattaatgattttaatatgaatcgtttagaccataatgagcgtttagagtttttgggtgatgcggtattagaattgacggtttcacgatatttatttgataaacatcccaacttgccagaagggaatttaacaaaaatgcgtgccactattgtatgtgagccctcacttgtaatatttgcgaataaaattggattgaacgaaatgattttacttggtaaaggtgaagagaaaacagggggacgtacaagaccatcattaatatcagatgcattcgaagcatttattggggcattgtatttggatcaaggactagatatagtttggaaatttgctgagaaagtcattttcccacatgtagaacaaaatgagttattaggcgtggtagattttaaaacacaattccaagaatatgtgcaccagcaaaataaaggtgatgtaacctataatttaataaaagaagagggaccggcacatcatcgtctattcacttcagaagttattctgcaaggggaagcaatagctgaaggtaaagggaaaacgaaaaaagaatcagaacaacgtgctgctgaaagtgcctataagcaattaaagcaaattaaatagaaatttatatgatacgacatataggtgttcgatttaggatttatggaagaatttttaatattttatggaacaacctcgaaatttaatatacaaatactaaaatatcgtatacgtatgttctttaaaattgtgataaggagtttaggatggtttatttaaaatcaatagatgccattggatttaagtcttttgcagatcaaaccaatgttcaattcgataaaggtgtaactgcaattgttggtccaaatggaagtggtaaaagtaatattacagatgctattaaatgggtgttgggtgaacaatcggctaaatcattacgtggctcaaaaatggaagatattatcttctcaggtgcagaacatcgcaaagctcaaaattatgctgaagtacagttaagattagataatcattctaaaaagctaagtgttgatgaaaacgaagttattgtaacaagaagattgtatcgaagtggtgaaagtgagtactacataaataatgaccgtgcaagattaaaagatattgccgatttatttttagattctggattggggaaagaagcatatagcattatctcgcaaggtagagttgatgaaatactaaatgctaaaccaattgatagacgtcaaattattgaagaatcggctggtgtacttaaatataaaaaacgtaaagctgaatcattaaataaacttgaccaaacagaagataatttaacgagagtagaagacattttatatgatttggaaggtcgcgtagaacctctaaaagaggaggcagctatagctaaagaatataagacactttcacaccaaatgaaacatagtgacatcgtagttacagtgcacgatattgatcaatatacaaatgacaatagacaattagatcaacgtttaaatgatttacaaggtcaacaagcaaataaagaagctgacaagcaacgtttaagccaacaaattcaacaatataaaggtaaacgacatcaacttgataacgatgttgaatcgcttaattatcaattagtaaaagctacggaagcctttgaaaaatatacgggacaattaaatgttttagaagaacgtaagaaaaatcaatctgaaacaaatgcacgatatgaagaagaacaagaaaatttaattgagcttttagaaaatatatcaaatgagatttctgaagctcaagatacttataagtctctgaaaagcaaacaaaaagaactcaatgctgtcattcgtgaacttgaagaacaactttatgtttcagacgaagcacacgatgaaaaattggaagaaattaaaaacgaatactatacattaatgtcagagcaatcagatgttaacaatgatattcgttttttaaagcatactatagaagagaatgaggctaaaaaatcaagactagattctcgattagttgaagtctttgagcaattaaaagatattcagggtcaaataaaaacgactaaaaaagaatatcaacagaccaacaaagaactttctgctgtagataaagaaattaaaaatatagaaaaagacctcactgatacaaaaaaagcacaaaacgaatacgaagaaaaattgtatcaagcatatcgatataccgaaaaaatgaaaacacgtattgatagtttggcaacgcaagaggaagaatatacttattttttcaatggcgtcaaacatattttgaaagctaaaaataaagaattaaagggtattcatggtgcagttgcggaaattattgatgtgccatctaaattaactcaggcaattgaaacagcattaggtgcttcattacaacatgtcattgtagattcagaaaaagatggacgccaggctattcaatttttaaaagaacgtaatttaggtcgtgcgacgtttttaccattaaatgtcatacagagtagagtggtagcgactgatattaagtctattgctaaagaggcaaacggatttattagtattgcttcggaagcagttaaagtagcaccagaatatcaaaatattatcgggaatttattaggtaatacgattatcgttgatcatttaaagcatgcaaatgaattggcacgtgcgattaaatatcgaactcgtattgttactttggaaggtgatattgtaaatcctggtggttctatgactggtggtggcgctcgtaagtcaaaaagtattctgtctcaaaaagacgagttgacaacaatgagacaccaattagaagattacttgcgtcaaacagaatcatttgaacaacaatttaaagagttgaagataaaaagtgatcaattaagtgaactgtattttgaaaaaagtcaaaagcataatacacttaaagagcaagtgcatcattttgaaatggagctcgatagattaactacacaagaaacacaaataaaaaatgatcatgaagaattcgaatttgaaaaaaatgatggttatacgagtgataaaagtcgacaaactttgagtgaaaaagaaactcatttagaaagtattaaagcatctttaaaacgactagaagatgaaattgaacgctacacaaaactttctaaagaaggtaaggaaagcgtaactaaaacacaacaaacgttacatcagaaacaatctgatcttgctgtggttaaagagcgtattaaaacacaacaacagacaatagatcgattaaataatcaaagtcaacaaaccaaacatcaattaaatgatgttaaagaaaaaatagcattctttaattcggatgaagtgatgggcgaacaagcttttcaaaatattaaagatcaaattaatggtcaacaagaaacgagaacacgcttatctgatgaattagataaattgaaacaacaacgtattgagttgaatgaacaaatcgatgcgcaagaagctacactacaagtttgtcaccaagatattttagctatcgaaaatcactaccaagatattaaagctgaacaatcaaagctagatgtattaattcatcatgcgatagatcatttaaatgatgaatatcaattgactgttgaacgtgcaaaatctgaatatacgagtgatgaatcgattgacgcattacgtaaaaaagttaaattaatgaagatgtcgattgatgaactaggtcctgtaaacttaaatgcaattgaacaatttgaagagttaaatgaacgttatacatttttaagtgagcaacgcacagatcttcgtaaagctaaagaaacattagagcaaattataagtgaaatggatcaagaggttactgaaagatttaaagaaactttccatgctattcaaggacattttacagctgtgttcaaacaattgtttggtggaggtgatgcagaattgcaattaactgaagccgattatttaacagctggtattgatattgtggtacaaccaccgggtaaaaagttgcaacatttatcgttactaagtggtggtgagcgtgcattaactgctattgctttactatttgcaattttaaaagtaagatctgcaccttttgttatattagatgaggttgaagctgcattagatgaagcgaatgttattagatacgcaaaatatttaaatgagttatcagacgaaacacagttcattgttattacacaccgtaaaggaacaatggaatttgcagataggttatacggtgtaacaatgcaagaatcaggtgttactaaacttgtgagtgtgaatttaaatacaatagatgatgtgttgaaggaggagcaataatgagcttttttaaacgcttaaaagataagtttgcaacaaataaagaaaatgaagaagtaaaatccttaacagaagaacaaggtcaagacaaattagaagatacacattctgaaggttcaacgcaggacgtaaatgatttagcagaaaatgctgaagtgaaaaagaagccacgcaagttgagtgaagcggattttgatgacgatggcttaatatcaattgaagattttgaagaaattgaagctcaaaaaatgggtgctaaatttaaagcaggactcgaaaaatctcgtcaaaatttccaagaacaattaaataatttgatagcgagatatcgtaaagtagatgaagacttttttgaagctttagaagaaatgttaatcactgcagacgtcggttttaatacagtgatgacgttaactgaagaattacgtatggaagcacaacgacgtaatattcaagatactgaagatttgcgtgaagtcattgttgaaaaaatcgtagagatttaccatcaagaagatgataattcagaagctatgaacttagaagatggtcgtttaaatgtcattttaatggtcggtgtgaatggtgttggtaaaacaacaacaattggaaaattagcttaccgatataaaatggaaggtaaaaaagtaatgttagctgcgggcgatacttttagagcgggtgctattgatcaattgaaagtttggggcgaacgtgttggtgtagatgtaattagccaaagtgaaggttctgatccagctgctgttatgtatgatgcgattaatgccgctaaaaacaaaggtgttgatattttaatctgtgataccgctggacgtttacaaaataaaacaaatctaatgcaagaattagaaaaagttaagcgtgtaattaatcgagcagtgccagatgcgcctcacgaagcattactatgtttagatgctacaactggtcagaatgcgttgtcacaagctagaaacttcaaagaagtaacaaacgttacaggtattgtattaacgaaattagatggtacagccaaaggtggtatcgtattagccattcgtaatgaattgcacattccagttaaatatgtaggtttaggtgagcagttagatgacttacaaccatttaaccctgaaagttatgtctacggcttattcgctgatatgattgaacaaaatgaagaaataacaacagttgaaaatgatcaaattgtaacagaagaaaaggacgataatcatggggcaaaatgatttagttaaaacgttacgaatgaattatttgtttgatttttatcaatccttattgacgaataaacaacgtaattatttggaattattttatctcgaagattattctttaagtgaaatcgcagatacttttaatgtgagtagacaagcagtttatgataatataagaagaactggcgatttagttgaagattatgaaaagaaattggaattataccagaaatttgagcaacgccgagaaatatatgatgaaatgaaacaacatttaagtaatccagaacaaatacaacgttatattcaacaattagaagacttagaatagatataaattgagggaggacatcgatatggcatttgaaggcttatcagaacgcctgcaagcgacgatgcaaaaaatgcgtggtaagggtaaacttactgaagctgatataaagataatgatgcgtgaagtaagattagcgttacttgaggctgacgtaaactttaaagtggtaaaagaatttattaaaacagtatcagaacgcgcattaggttccgatgtaatgcaatcattaacaccagggcaacaagttattaaaatagttcaagatgaattaacgaagttgatgggtggagaaaatacatcgattaatatgtcgaataaaccacctactgttgttatgatggttggtttacaaggagctggtaaaacaacaactgcaggtaaattagcattattgatgcgtaaaaaatacaacaaaaaacctatgttagttgcagcagatatttatcgtccagcagcgataaatcaattacaaacagtagggaaacaaattgatattcctgtatacagtgaaggagatcaagtaaagccacaacaaattgtaactaatgcattaaaacatgctaaagaagaacatttagactttgtaatcattgatacagcaggtcgattacacatcgatgaagcattgatgaacgaattaaaagaagtaaaagacattgctaaaccaaacgaaattatgttagttgtcgattcaatgacgggtcaagatgctgtcaatgttgcagaatcttttgacgatcaacttgatgtcacaggtgttaccttaactaaattagatggtgatacacgtggtggtgcagctttatctattcgttcggtgacacaaaaaccaattaaatttgttggtatgagtgaaaagttagatggtttagagctattccatcctgaacgtatggcatcacgtattttaggtatgggtgatgtgttaagtttaattgaaaaagcgcaacaagatgtggatcaagaaaaagcaaaagatttagagaaaaagatgcgtgagtcatcatttactttagatgattttttagaacaacttgatcaggtgaaaaatttaggaccactggatgatattatgaaaatgattccaggtatgaataaaatgaaaggtctagataagcttaatatgagtgaaaagcaaattgatcatattaaagcgattatccagtcaatgacgccggctgaaagaaacaatccagacacattgaatgtatcacgtaaaaagcgtattgctaaaggttctggtcgttcattacaagaagtcaatcgtttgatgaaacaatttaacgatatgaagaaaatgatgaaacaattcactggtggcggtaaaggtaaaaaaggtaaacgcaatcaaatgcaaaatatgttaaaaggtatgaatttaccgttttaatgtttaatataacatgctgatttttgttgcaatgagatgtgcatcccgaaagttatactaaagaatataactttatggggtgcatatttttagatacacaataataattaaaaactgaaattgctgatttgctagaacatgaggttattgttgctaatattaataagttatattgggggaacgtgtgcggtagaagtggtaccattcatgtccttacgggataaattaactaaacacgtatgtggtgaaggctactatgaatttttataacctattaacagtctaatttagtaatcacatagttatttttgtaaggaaaaggttcaataattttcctggtaaagaaaaaactctttacaaacattcacacacctgttaatattatttcttgtagaaaataaaaattaaaacatgacttaaaggagattttataaatggcagttaaaattcgtttaacacgtttaggttcaaaaagaaatccattctatcgtatcgtagtagcagatgctcgttctccacgtgacggacgtatcatcgaacaaatcggtacttataacccaacgagcgctaatgctccagaaattaaagttgacgaagcgttagctttaaaatggttaaatgatggtgcgaaaccaactgatacagttcacaatatcttatcaaaagaaggtattatgaaaaaatttgacgaacaaaagaaagctaagtaatttagcgtaaaattgttctaacaataagaataactcgtttacactgacagttattactcaatgatacgttgggaatatcacatgttagtaatatagaacgtattgggtaccataatggtgccctttttctttgaattattttcaattaaaatagaagtgttcaaagcatagagttggaggtaatagaatgagagttgaagttggtcaaattgttaacacacatggtattaaaggtgaaattaaagtaaaatccaattcagactttacagacgttcgttttcaacccggtcaagtgctgacagttgtgcataacaataacgaccttgaatatactgttaagtcacatagagtgcataaagggcttcatatgcttacatttgaaggtattaataatattaatgatattgagcatttaaaagggagttctatttatcaagagcgtgatcatgaagatatcgtacttgaggaaaatgaattttattattcagatattataggatgtacagtttttgatgatcaagaaacaccaataggtcgtgtaattaatatatttgaaacaggtgcgaatgatgtgtgggtgattaaaggatctaaagaatatttgattccttatattgctgatgttgtaaaagaagtggatgttgaaaataaaaaaattatcatcacgccaatggaaggattgttggattaatgaaaattgattatttaactttatttcctgaaatgtttgatggtgttttaaatcattcaattatgaaacgtgcccaagaaaacaataaattacaaatcaatacggttaattttagagattatgcaattaacaagcacaaccaagtagatgattatccgtatggtggcggacaaggtatggtgttaaagcctgaacctgtttttaatgcgatggaagacttagatgtcacagaacaaacacgcgttattttaatgtgtccacaaggcgagccattttcacatcagaaagctgttgaattaagcaaggctgaccacatcgttttcatatgcggacattatgaaggttacgatgaacgtatccgaacacatcttgtcacagatgaaatatcaatgggtgactatgttttaacaggtggagaattgccagcgatgaccatgactgatgctattgttagactgattccaggtgttttaggtaatgaacagtcacatcaagacgattcattttcagatgggttattagagtttccgcaatatacacgtccgcgtgaatttaagggtctaacagttccagatgttttattgtctggaaatcatgccaatattgatgcatggagacatgagcaaaagttgatccgcacatataataaaagacctgacttaattgaaaaatatccattaactaatgcagataagcaaatattagaaagatataaaataggattgaaaaaaggttagtattgtgctaacataatctgagtgtggaaacacaaaaatcactatgatccgctgctatatatttgtcgaggcaagaacataggttgaagaggagaatttataatgacaaatcacaaattaatcgaagcagtaactaaatcacaattacgtacagacttaccaagtttccgtcctggtgatactttacgtgtacacgtacgtatcattgagggtactcgtgagcgtatccaagtattcgaaggcgttgtaattaaacgtcgtggcggtggcgtttctgaaacgtttacagttcgtaaaatttcatcaggtgttggcgtggaacgtacattcccattacacacaccaaaaattgaaaaaatcgaagttaaacgtcgtggtaaagtacgtcgtgctaaattatattacttacgtagtttacgtggtaaagctgctagaatccaagaaattcgttaatcagcatttaaacaaagctatgtatgagtcatattcgactcaaacaacaaagccatctaggtcacttttatggagtgatatagatggctttttttgctgtttagttaatgtaaagttgataatgtaattgtttttcccttctttattcataacgtgtttgctcaaaatggttatataaacaaaaatctactaagtgccattgaaaaggacttagtagatttattaaatatatgcgtagcaacattatttttgtcttgcccatctcgtgaaaataatactacatataatgccaaatacagtaattgttataagcaaataatagtatggtggggtatagctcaattgaatctttgttatatttttaggtgctttaatgccggtcataacaccatttacttgttcaactttaagactttgatcacctgatgtcgcttccataccttgattatatgctgttggcaaaacaatatacccagatgaatttttatttttagtaatagtataaccttgctttgtcttactaactttgacagcctctaatgaatttgaagcgtctttaagcgtggtataatcttcgccgtatatcccttttaaatttacacgatacttacctttaggcaacgataatctaatcctatctgaagctttaatgcgtatcgttacgggtgttacaaagcgtcgatatttataagtgagtttatttctttcttgtgtatattcattcactttaacatcatgagctttatccggcgaaagtaattctaaatccatttcaaaatacaaatctttaaattgattagaaactgattttggcaactgtacagttagaccaccattattttgtttaacttgcaataaatgttttgtaggagattgccaggctgcactatttaatttaattgttgaatctgatagtaaatttttattggctttaaaatgtgtattaacatctttagtattgttagaaacaatcccttgcaacattgcttgttctttatctaatggagattttaattctttattggaaaagaccttatttgtaatatgtgcactgggataatggatggtatttttagaatgaatccaacgaactttattgtctttgtgttcagagttaattttaaatccatatggtaagttgtcatcatgattcactctaattcgatcattaacattccaaagtgatagtaaattttgacgattgccaagtaatctataagtgctgtttttatcaattggcatattaatttggagtgtcttgtcataatattttaaaatgtctccattaaaaatactagaatataatgaaatgccattataatgatatataaatggtgaatttaatgcatagtctgacatataatcaatgcgattaaatgggcctgttgcattttgatttatcttttttataagctggtttacatagttactatggtaatcatgttgtttcaacgttgataatgattgttgataaggtttgattgccatatttttgttgttatctaaaatgacgatttgttgaatcataacgattaatactaatattgcaacggttaattttttataacgccataaactaaattttaaaataacggcaagcaccattagcaggataatacctactataagtgcgagagggtgtgtcggtgatagtaatacataaagtaatgcgatgatgcttactggtattgttctgattaaataatatttcatatttaatgttgataaatgttgaataaacaatccgcaaagagcacttgatgatagtgctaagatatacacccaacgcctttctggaaatgaaaaaccattaaaagcactgtcgaaatactgtgataatgaaccaataaataatatccatgttattattgcgaaaagtctataaaagtaaaaacgatacagtttgaatgacaataatgcaacgaaagtaagaattgaaatcgtaatgaaaaatccatcgctaaagaaaaaataatgataatcaagtggtgtcaaaaacggtatatcaacattgggattttgctttctgtcattttccaaaaacgcagaaatgccagtgaataaaccaaatacacttgataacacactcaaaactgtagcagatatgacgcaaattaatttttgtgttctagagacaatgtcatatttgtatgtgaaaatgagtcgatataaatagtagcaacctataataatagcttgataataactgaaataaaaattgctgaatagtgttaaggctatcgcaacaatgaaaataccgattttgcgttgttgaaaatatctttccaaaccaagaatcgataatggcaataaatataataaatttccataaaatgaccaagtaaaattaaagtatataacgacagttgacatgccgtataaaatcgtagcgatcatatttgttgagcgtttaaagtgtaatattttaaataagtagaaggtcacgacaaatgttatgatagctcgtatcatagccataataagttggtttgtcggccaaaaatgtattgttgtcggattaaatataccaacagtttctcctattttaatgaatagaaaatttagccacattaatggtgacagcgaataataatatgatagtcctttcatataatcgccacctaatccaaacgatgcatcatataaactagaaaaactacttagatgttcatacaaatacatttgaaatggcatcatttgacggaatccatctccagccccactaaaaacagtaccattcacaatataatcatagatatgagtagaaaataaaataagcgttaatattacactcatgaaagttataacaaagaattgtttgacgtttgaatttagccacttttttaacacaacattatcctcaactttcaaatttaaaattaagtttaactgaaactaaagttaatgaggttctcgataggtaaagacgaagatgactgtggaacagataccttatcatagttacttaaactttggattatttttagtttatcattaaacaaatatattgaataataaaaatgtcatactgtattaaatgaatatcacctaataagcagcttagatttaataaatgataatttttaattagagaaaacttggaataatcacttataccttaatctaaagcattgttaagaagtgtgacaatgttaaaataaatatagttgaattaatgaatttgttctataattaacaagttatagattttaataatgagaaaagaattgacgaaagtaaggtgaattgaatggttattcaatggtatccaggacatatggcgaaagccaaaagagaagtaagtgaacaattaaaaaaagtagatgtagtgtttgaactagtagatgcaagaattccatatagttcaagaaaccctatgatagatgaagttattaaccaaaaaccacgtgttgttatattaaataaaaaagatatgtctaatttaaatgagatgtcaaaatgggaacaattttttattgataaaggatactatcctgtatcagtggatgctaagcacggtaaaaatttaaagaaagtggaagctgcagcaattaaggcgactgctgaaaaatttgaacgcgaaaaagcaaaaggacttaagccaagagcgattagagcgatgattgttggaattccaaatgttggtaagtccacattaataaataaactggcaaagcgtagtattgcacagactggtaataaaccaggtgtgaccaaacaacaacaatggattaaagttggtaatgcattacaattattagacacaccaggaatactttggcctaaatttgaagatgaagaagtcggtaagaagttgagtttaacaggcgcgattaaagatagtattgtgcacttagatgaagttgccatctatggtctgaactttttaattcaaaatgatttagcgcgcttaaaagcacattataaaatcgaagttcctgaagatgcagaaatcatagcgtggtttgatgcgatagggaaaaaacgtggcttaattcgacgtggtaatgaaattgattacgaagcagtcattgaactgattatttatgatattcgaaatgctaaaataggaaattattgttttgatatttttaaagatatgactgaggaattagcaaatgacgctaacaattaaagaagtaacgcagttgattaatgcggttaatacaatagaagaattagaaaatcatgaatgttttttagatgagcgaaaaggtgtacaaaatgccatagccagacgaagaaaagcgttagaaaaagaacaagctttaaaagaaaaatatgttgaaatgacttactttgaaaatgaaatattaaaagagaatcccaatgctattatttgtggtattgatgaagttggaagaggacctttagcaggtccagtcgttgcatgcgcaacaattttaaattcaaatcacaattatttgggccttgatgactcgaaaaaagtacctgttacgaaacgtctagaattaaatgaagcactaaaaaatgaagttactgcttttgcatatggtatcgcgacagctgaagaaatagatgaatttaatatttataaagctactcaaatcgccatgcagcgagctattgatggattatcagtacaaccaacgcatttattgatagacgcgatgacacttgataatgcactgcctcaagtatctttaatcaagggtgatgcaagaagtgtgtccattgcagctgcaagtatcatggcaaaggtttttcgtgatgattatatgacacagttatctaaagattatcctgaatatggttttgaaaaaaatgcgggttacggtacgaaacaacatttactagcaatcgatgatattggcataatgaaagagcatagaaaaagctttgaacctataaaatcgttactgtaaatcgtaaaattcaattaaatgataaaaaagtagcatttaagtttacaatagcgcttacattttttataattgtaagggaacttaacctaagtaacaggaggatggaagatgaatatccacgagtatcaaggtaaagaaatatttcgttcaatgggcgttgcagttccagaaggacgagtagcatttactgctgaagaagcggtggagaaagcaaaagaattaaattctgatgtatatgttgtaaaagcacaaattcatgctggaggtagaggtaaagcaggcggagtaaaaattgctaaatctttatctgaggtagaaacatatgcaaaagaattattagggaaaactttggtgacacatcaaactggtccagaaggtaaagaaattaagcgtttatatatcgaagaaggttgtgctattcaaaaagaatattacgttggattcgttattgatcgtgcgactgatcaagtaacattgatggcgtctgaagaagggggcactgagattgaagaagttgctgcgaagactcctgaaaagatcttcaaagaaactatcgatccagtaatcggactttcaccattccaagcaagacgaattgcgtttaatattaatattcctaaagaatctgttaacaaagctgctaaattcttattagcactttataatgtattcattgaaaaagattgttcaatcgtagaaatcaacccattagttacaacagctgatggtgatgtattggcattagatgctaaaattaattttgatgataatgcattattcagacataaagatgttgtagaattacgtgatttagaagaagaagatccgaaagagattgaagcgtctaaacatgatttatcatacattgcattagatggtgacatcggatgtatggtgaatggtgcaggtttagccatggcaacaatggatacgattaatcatttcggtggaaacccagccaatttcttagatgcaggcggaagcgctactagagaaaaagtaactgaagcatttaaaatcattttaggtgatgaaaatgttaaaggtatttttgtaaacattttcggtggcattatgaaatgtgatgttatcgcagaaggtatcgttgaagctgtaaaagaagtagatttaactttaccactagttgtacgcttagaaggtacaaatgttgagttaggtaaaaaaatcttaaaagactcaggattagcaattgaaccagcagcaacaatggctgaaggtgcacaaaaaattgttaaactagtcaaagaagcataaggaaaggatgggagcactaagatgagtgtatttatagataagaatactaaagtaatggtacaaggtattacagggtctactgcccttttccatacaaaacaaatgcttgattatggtacgaaaatagtagcaggtgtgacgcctggtaaaggtggtcaagttgttgaaggcgttcctgttttcaatactgttgaagaagctaaaaatgaaactggggcaacggtttcagtcatttacgttccagcaccatttgctgcagactcaattttagaagcagctgatgcagacttagatatggttatttgtatcactgaacatattcctgtattagacatggttaaagttaaacgctacttacaaggtagaaaaacacgtttagttggtccaaactgtccaggtgtgattacagcagatgaatgtaaaattggtattatgcctggctatattcacaaaaaaggtcatgttggtgtagtatcacgttcaggtacactaacatatgaagcagtgcaccaattgactgaagaaggtattggtcaaactacagctgttggtattggtggagacccagtcaacggaacaaactttattgatgttttaaaagcattcaatgaagatgacgaaacgaaagcagttgttatgattggtgaaatcggtggtacagctgaagaagaagcagctgaatggattaaagcgaatatgacaaaaccagttgtaggctttatcggtggacaaacagcacctcctggaaaacgtatgggacatgctggtgcgatcatttcaggtggtaaaggtactgctgaagagaaaattaaaacattaaatagttgtggtgtgaaaacagcggcaacaccttcagaaattggttcaacattaattgaagctgctaaagaagcaggtatttatgaaacattattaacagttaataaataaagttaaaagatgatataaatggctatagcccattccatactttataaaagtatcggaaatgggctatttgtcgtgcgatgaattttagtacacttttcatatttcggaaaggcaagttaattattttacctccttcaatagctttatataacaaagcaaatttttattaaaatatatagtgaactatgttataatatttatatattattgcaaggagtgtttcatcatgaataaacaacaaagtaaagtacgctattcaattagaaaagttcgttttggaacatttttaaatggtgattatgatggaaaattaatgaagttccaaagtttagatcaaaactggaataatggtggatggcgtaaagcagaggttgcacataaagttgttcataattatgaaaatgatatgatttttattagaccatttaaaaaagcataatttaaatcgaaggcaggacattgaaatatgaaattttcaactttaagtgaagaagaatttaccaactacaccaaaaagcacttcaaacattatacacagtctatagaattatataattatagaaataaaataaatcatgaagcacatattgtgggagtgaaggatgataaaaatgaagttatagctgcatgtttattaacagaggcacgtatttttaaattctacaaatatttctactctcatagaggtcctttacttgattatttcgatgctaaattagtttgttacttttttaaagaattatctaaattcatttataaaaatagacgagtatttattcttgttgatccatatttaatagagaatttgagagatgcaaacggtaggataataaagaattataataattcagtgatagtaaagatgctaggaaaaattgggtatctccatcaaggttatacaacaggatattcaaataaaagccaaattaggtggatttctgtattggatttaaaagataaagatgagaatcaacttttaaaagaaatggaataccaaactagaagaaatataaaaaaaactattgagattggtgttaaggttgaagatttatctattgaagaaacaaatcgattttataaattgtttcaaatggctgaagaaaaacatggttttcatttcatgaatgaagattattttaaacgaatgcaagaaatatataaagataaggcaatgttaaagatagcttgcatagatcttaatgaatatcaagataaattaaaaatacaattattgaaaatcgaaaatgaaatgatgactgtgaacagagcattaaatgaaaatccaaattctaaaaagaataaatctaaattaaatcagttaaatatgcaattatctagtattaataatagaattagtaaaaccgaagaactaatattagaagatggacctgttttggatttagctgctgctttatttatatgtactgatgatgaagtttattatctatcaagtggatcaaatcctaaatataatcagtatatgggcgcatatcatctacaatggcatatgataaaatatgcaaaatcacataatattaataggtataatttttatggaataacaggcgtctttagtaatgaggcggatgattttggtgtacaacaatttaaaaaaggttttaatgcacatgttgaagaattaattggtgatttcatcaaaccagtaagaccaattctatataaatttgcaaaacttatttataaggtttgattataaagtatgttggaaattgaaatttaaaattctttccaacatacttttcactttttaagtcggtattttactccttaaattaacattacatcgacaatgtttttgtattagaaatgtaaaacaaaaatagaatatgattttgtatgattaaaaaaaggagttgatttattgattagactatttttgcttaagttatactgggcacacttttcgactaaacaaattcatcaatttttaatggcatatcctaatgtaattaaagaggggggcagaaaaaaagatagttatttatgtgaatgggtgaatagggaagaaaatgttcatttattacgtaaatactatgcttttataaaacttgatcataacgatattattaaagaactgcagaaattaaaagtaagttacattacatatatggatactgaatacccagtgctattaaaagaaatatatcaatttccattacttcttttctataaagggaacataaatttaataaataatatgcatcatttggcagtagtaggtgcaagagattctacaagttatacccaacagtctttagaatttttattatcaaatgataaaagcaaatatttaacaattgtttccggccttgctcaaggagctgatgcaatggcacatcaaatagctttaaaatacaatctccctacaatagcagttttagcctttggccatcaaatacattatcccaaaagtacattagcattaagaaataaaatagaagaaaaaggtttagttatatccgaatatccaccacatacaccaattgctaaatatagatttcctgagcgcaatagaattatcagcggtttgtcaaaaggggttttaattactgaggctaaggaacaaagtggcagtcacatcacgatagattttgcattagagcaaaatagaaatgtttatgttttacctggatctatgtttaatcctatgacaaaaggtaatttattacgtatccaagaaggagctaaggtagtattaaacgctaatgatatatttgaagactactatatttaaaactaaaataacgagttgcttcatatttcttttgttaccctttgtaatttattttttaataaaatctataaaaaatagacagtgaaaatcatttgtttagatataaaacgttgacaaaagcaaaattaagcgtttatcatttatctttagtaattagattagcgagggggaaatgacattggcagataatttagtcattgttgaatcgcctgcaaaagcaaaaaccattgaaaagtatttaggtaagaaatataaagttatagcttcaatgggacacgtcagagacttaccaagaagtcaaatgggtgtcgacactgaagataattacgaaccaaaatatataacaatacgcggaaaaggtcctgttgtaaaagaattgaaaaaacatgcaaaaaaagcgaaaaacgtctttctcgcaagtgaccccgaccgtgaaggtgaagcaattgcttggcatttatcaaaaattttagagcttgaagattctaaagaaaatcgcgttgttttcaacgaaataactaaagacgctgttaaagaaagttttaaaaatcctagagaaattgaaatgaacttagtcgatgcacaacaagcgcgtcgaatattagatagattagttggctataacatctcgccagttctttggaaaaaagtaaaaaaagggttgtcagcgggtcgagttcaatctgttgcacttcgtttagtcattgaccgtgaaaatgaaattcgaaactttaaaccagaagaatattggactattgaaggagaatttagatacaaaaaatcaaaattcaatgctaaattccttcattataaaaataaaccttttaaactaaaaacgaaaaaagatgttgagaaaattacagctgcattagatggagatcaattcgaaattacaaacgtgactaaaaaagaaaaaacgcgtaatccagcaaacccatttacaacttctacattacaacaagaggcggcacgtaaattaaactttaaagctagaaaaacaatgatggtcgcacaacaattatatgaaggtatagatttgaaaaaacaaggtacgattggtttaataacatatatgagaaccgattctacacgtatttcagatactgccaaagctgaagcaaaacagtatataactgataaatacggtgaatcttacacttctaaacgtaaagcatcagggaaacaaggtgaccaagatgcccatgaggctattagaccttcaagtactatgcgtacgccagatgatatgaagtcatttttgacgaaagaccaatatcgattatacaaattaatttgggaacgatttgttgctagtcaaatggctccagcaatacttgatacagtctcattagatataacacaaggtgacattaaatttagagcgaatggtcaaacaatcaagtttaaaggatttatgacactttatgttgaaactaaagatgatagtgatagcgaaaaggaaaataaactgcctaaattagagcaaggtgataaagtcacagcaactcaaattgaaccagctcaacactatacacaaccacctccaagatatactgaggcgagattagtaaaaacactagaagaattgaaaattgggcgaccatcaacttatgcaccgacaatagatacgattcaaaagcgtaactatgtcaaattagaaagtaagcgttttgttcctactgagttgggagaaatagttcatgaacaagtgaaagaatacttcccagagattattgatgtggaattcacagtgaatatggaaacgttacttgataagattgcagaaggcgacattacatggagaaaagtaatcgacggtttctttagtagctttaaacaagatgttgaacgtgctgaagaagagatggaaaagattgaaatcaaagatgagccagccggtgaagactgtgaagtttgtggttctcctatggttataaaaatgggacgctatggtaagtttatggcttgctcaaacttcccggattgtcgtaatacaaaagcgatagttaaatctattggtgttaaatgtccaaaatgtaatgatggcgacgtcgtagaaagaaaatctaaaaagaatcgtgtcttttatggatgttcgaaatatcctgaatgcgactttatctcttgggataagccgattggaagagattgtccaaaatgtaaccaatatcttgttgaaaataaaaaaggcaagacaacacaagtaatatgttcaaattgcgattataaagaggcagcgcagaaataatatttttatttcctagagacattttaagattgttaaatagaatcattagtgaatcttattttaaagatagtaatggattaatctatataagtgcggataatataaacataacaacataattaaaagacataaatgacaataaaaggagtatagaaatgactcaaactgtaaatgtaataggtgctggtcttgccggttcagaagcggcatatcaattagctgaaagaggaattaaagttaatctaatagagatgagacctgttaaacaaacaccagcgcaccatactgataaatttgcggaacttgtatgttccaattcattacgcggaaatgctctaactaatggtgtgggtgttttaaaagaagaaatgagaagattgaattctataattattgaagcggctgataaggcacgagttccagctggtggtgcattagcagttgatagacacgatttttcaggttatattactgaaacactcaaaaatcatgaaaatatcacagttattaatgaagaaattaatgccattccagatggatacacaattatcgcaacaggaccacttactacagaaacccttgcgcaagaaatagtggacattactggtaaagatcaactgtatttctatgatgcagctgctccaattattgaaaaagaatcaattgatatggataaagtttacttaaagtcccgttatgataaaggtgaagctgcctatttaaactgtcctatgactgaggatgaatttaatcgcttttatgatgcagtattagaagctgaagttgcgcctgtaaattcatttgaaaaagaaaaatatttcgagggttgtatgccttttgaagtaatggcagaacgcggacgcaagacattactatttggaccaatgaaaccagtaggattagaagatccaaagacggggaaacgtccttatgcagtggttcaattaagacaagatgacgctgctggcacactctacaatattgttggcttccaaacgcatttaaaatggggagctcaaaaagaagttattaaattaattccaggtttagaaaatgttgatattgttagatatggtgtgatgcatagaaataccttcattaactcaccggacgtattaaacgagaaatatgaattgatttcacaaccaaacatacagtttgcgggacaaatgactggtgttgaaggttatgtagaaagcgcagctagcggcttagttgcaggtatcaatcttgcgcataaaatattaggcaaaggtgaggtagtatttccgagagaaactatgattggaagtatggcttactatatttctcatgctaaaaacaataagaatttccaacctatgaatgctaacttcgggttattaccatctttagaaactagaattaaagataaaaaagaacgctatgaagcacaagctaatagagctttggattacttagaaaatttcaaaaaaactttataaaatagttagaaagactagatatgctattcattcttaagtcatcaacgagtaagtaatgactttctaaatggaaaatacttatcctagtctttttaattttggaattgttacgtatttctgacaattgagaattcgcattcaaaaaatatctaaataaataacacgcaataagttgattgatgtaacatgtaagagaatgttttaaataaactttatttaaaagacaatgaaataataaatggcaaggctattaataaagacttttagtaattaatttaaaaaagaggtattctaattaacaggttttccgattagttacaattatttaattctcaaaagatttagaattgattatcaaattactgtaagccctttgctgtatatgctacaattcttattgatggagggtaaatgtattgaatcatattcaagaaacgtttttaaatacattgaaagttgaacggaatttttcggaacatacattgaaatcatatcaagatgacttaattcagtttaatcaatttttagaacaagaacatttacagttgaatacttttgaatacagagatgctagaaattatttgagctatttatattcaaatcatttgaaaagaacatcagtttctcgtaaaatctcaacgttaagaactttctatgaatattggatgacgcttgatgagaacattattaatccatttgttcaattagtacatccgaaaaaagaaaaatatcttccgcaattcttttacgaagaagaaatggaagcgttatttaaaactgtagaagaggacacttcaaaaagtttacgggatcgagttattcttgaattgttatatgctacaggcatccgtgtttcggaattagttaatattaaaaaacaagatatagatttttacgcgaatggtgttaccgtattaggaaaagggagcaaagagcgctttgtaccgtttggtgcttattgtagacaaagcatcgaaaattatttagaacatttcaaaccaattcagtcatgcaatcatgattttcttattgtaaatatgaagggtgaagcaatcactgaacgcggtgtacgatatgttttaaatgatattgttaaacgaacagcaggcgtaagtgagattcatccccacaagctcagacatacatttgcaacgcatttattgaatcaaggtgcagacctaagaacagtacaatcgttattaggtcatgttaatttgtcaacaactggtaaatatacacacgtatctaaccaacaattaagaaaagtgtatctaaatgcacatcctcgagcgaaaaaggagaatgaaacatgagtaatacaacattacatgcaacaacaatttatgctgtaagacataatgggaaagcagctatggctggagatgggcaagtaacgcttggtcaacaagtcatcatgaaacaaacggcaagaaaagtgcgtcgtttatatgaaggtaaagtgttagctggtttcgcaggtagtgtagcagatgcgtttacgttatttgaaaaattcgaaacaaaattacaacagtttagtggtaacttagaaagagctgctgttgaattggcacaagaatggcgaggcgataaacaattacgtcaattagaagctatgctaattgtaatggataaagatgctattttagttgtcagtggaactggcgaagttattgccccagatgatgaccttatcgctataggatcaggaggcaactacgcattaagcgcaggacgtgcattgaaacgccatgcatcgcatttgtctgctgaagaaatggcatatgagagcttgaaagtagcggctgatatttgtgtctttaccaacgataatattgttgtcgaaacactataataatcagagcatgataaataattatgagcaattaattttagttaaaagacggaggaatgaaattaatggatacagctggaataagattaactccaaaagaaatcgtatctaaattaaatgaatacatcgttggacaaaatgatgctaaacgtaaagtggcaattgccctacgtaatcgatacagaagaagtttattagatgaggaatcaaagcaagaaatttcacctaaaaatattttgatgattggaccaaccggtgttggtaaaactgaaattgcaagaagaatggccaaagttgtcggcgcaccatttataaaagtagaagctactaaatttactgaagtaggttatgtaggacgagatgttgaaagtatggttagagatcttgttgatgtttcagtaagattagtcaaggcgcagaaaaaatcattggtacaagatgaagcaacagctaaggccaatgaaaaacttgttaagttattagttccaagtatgaaaaagaaagcgtctcaaacgaataatcctttagagtcacttttcggaggtgcaattccaaatttcggacaaaataacgaagatgaagaagaaccacctactgaggaaattaaaacaaaacgttctgaaattaagagacaattagaagaaggaaaacttgaaaaagaaaaggtaagaattaaagtcgaacaagatcctggtgctttaggtatgctaggtacaaatcaaaatcagcaaatgcaagagatgatgaatcaattaatgcctaaaaagaaagttgagcgagaagttgctgttgagacggcaaggaaaatcttagctgatagttatgcggatgaactaattgatcaagaaagcgctaaccaagaagcacttgaattagcagaacaaatgggtatcatctttatagatgaaatcgacaaagttgcgacgaataatcataatagtggtcaagatgtctcaagacaaggtgttcaaagagatattttacctatacttgaaggtagcgttattcaaaccaaatatggtactgtgaatactgaacatatgctgtttataggtgctggagctttccatgtatctaagccgagtgacttgataccagaattgcaaggtcgttttccgattagagttgaacttgatagtttatcggtagaagattttgtaagaattttgacagaaccaaaattgtcattaattaaacaatatgaagcattgcttcaaacagaagaagttactgtaaactttaccgatgaagcaattactcgcttagctgagattgcttatcaagtaaatcaagatacagacaacattggtgcacgtcgacttcatacaattttagaaaagatgttagaagatttatcattcgaagcaccaagtatgccgaatgcagttgtagatattaccccacaatatgttgatgataaattaaaatcaatttcaacaaataaagatttaagtgcatttattctataaaaatatacaaaaggagaaaaattcatgagcttattatctaaaacgagagagttaaacacgttacttcaaaaacacaaaggtattgcggttgattttaaagatgtagcacaaacgattagtagcgtaactgtaacaaatgtatttattgtatcgcgtcgaggtaaaattttagggtcgagtctaaatgaattattaaaaagtcaaagaattattcaaatgttggaagaaagacatattccaagtgaatatacagaacgattaatggaagttaaacaaacagaatcaaatattgatatcgacaatgtattaacagttttcccacctgaaaacagagaattattcatagatagtcgtacaactatcttcccaattttaggtggaggagaaagattaggtacattagtacttggtcgagtacatgatgattttaatgaaaatgatttggtactaggtgaatatgctgctacagttattggtatggaaatcttacgtgagaagcatagtgaagtagaaaaagaagcgcgcgataaagctgctattacaatggcaattaattcattatcttattctgaaaaagaagcaattgaacatatctttgaagaacttggcggtacagaaggcctattaatcgcatcaaaagttgcagatagagttggtattactagatctgtaattgtaaatgcactacgtaaattagaaagtgctggtgtaattgaatcacgttctttaggaatgaaaggtactttcattaaagttaaaaaagaaaaattcttagatgaattagaaaaaagtaagtaagtcgatgagtctgggacataattcaatgtcctagtcgtgacgatgttatcttggcagtagtcaacgaaatgactttgatgattatgttgaagtcatttctttatttttgtctaattttcaatcaaattgatattccacattaacatgatagaattacctttaaatttatgaaaaaatgcttgaaaaacatttgctttagacacggcattatgttatatttattttcggctataaagccaatacacacatatcaaacgtgattgtgtaaagggtgcaatatttgtatattgtctttacaatagtttgatatggaggtaattaaccaataggaggaatttataatggcagtaatttcaatgaaacaattactagaagcgggtgttcacttcggtcaccaaacacgtcgttggaacccaaaaatgaaaaaatatatcttcactgagagaaatggtatttatatcatcgacttacaaaaaacagtgaaaaaagtagacgaggcatacaacttcttgaaacaagtttcagaagatggtggacaagtcttattcgtaggaactaaaaaacaagcacaagaatcagttaaatctgaagcagaacgtgctggtcaattctacattaaccaaagatggttaggtggattattaactaactataaaacgatctcaaaacgaatcaaacgtatttctgaaattgaaaaaatggaagaagatggtttattcgaagtattacctaaaaaagaagtagtagaacttaaaaaagaatacgaccgtttaatcaaattcttaggcggaattcgtgatatgaaatcaatgcctcaagcattattcgtagttgacccacgtaaagagcgtaatgcaattgctgaagctcgtaaattaaatattcctatcgtaggtatcgttgacactaactgtgatcctgacgaaattgactacgttatcccagcaaacgacgatgctatccgtgcggttaaattattaactgctaaaatggcagatgcaatcttagaaggtcaacaaggcgtttctaatgaagaagtagctgcagaacaaaacatcgatttagatgaaaaagaaaaatcagaagaaacagaagcaactgaagaataatcaactgttgaatctgacttagatatagtttaaatgggtgataagatattaatgcttatcaccttttttaaaaagaaaatcgaggcaaattacaaatattcaattagagtattggcaatcttgcctataataatgctaaaatcataatatataaaatgataacttattggaggaataatgaatggcaactatttcagcaaaacttgttaaagaattacgtgaaaaaactggcgcgggtatgatggattgtaaaaaagcgctaactgaaactgatggtgacatcgataaagcgattgactacctacgtgaaaaaggtattgctaaagcagctaaaaaagcagaccgtattgcggctgaaggtttagtacatgtagaaactaaaggtaacgacgcagttatcgtagaaatcaactctgaaacagactttgttgctcgtaacgaaggattccaagagttagttaaggaaatcgctaatcaagtattagatacaaaagctgaaactgttgaagctttaatggaaacaactttaccaaatggtaaatcagttgatgaaagaattaaagaagcaatttcaacaatcggtgaaaaattaagtgttcgtcgttttgctatcagaactaaaactgataacgatgctttcggcgcttacttacacatgggtggacgcattggtgtattaacagttgttgaaggttcaactgacgaagaagcagcaagagacgttgctatgcatatcgctgcaatcaaccctaaatatgtttcttctgaacaagttagcgaagaagaaatcaaccacgaaagagaagttttaaaacaacaagcattaaatgaaggtaaaccagaaaacatcgttgaaaaaatggtggaaggacgtttacgtaaatacttacaagaaatttgtgctgtagatcaagacttcgttaaaaaccctgatgtaacagttgaagctttcttaaaaacaaaaggtggaaaacttgttgacttcgtacgctatgaagtaggcgaaggtatggaaaaacgcgaagaaaactttgcggatgaagttaaaggacaaatgaaataatctgtcataaagtaaaacaaggaagaagacacctttaatgttgctttattaaaatgtaaatcattctaataaaacgacaactgtgtcttctttacttgtatatgttacatatattcacgatagagaggataagaaaatggctcaaatttctaaatataaacgtgtagttttgaaactaagtggtgaagcgttagctggagaaaaaggatttggcataaatccagtaattattaaaagtgttgctgagcaagtggctgaagttgctaaaatggactgtgaaatcgcagtaatcgttggtggcggaaacatttggagaggtaaaacaggtagtgacttaggtatggaccgtggaactgctgattacatgggtatgcttgcaactgtaatgaatgccttagcattacaagatagtttagaacaattggattgtgatacacgagtattaacatctattgaaatgaagcaagtggctgaaccttatattcgtcgtcgtgcaattagacacttagaaaagaaacgtgtagttatttttgctgcaggcattggaaacccatacttttctacagatactacagcggcattacgtgctgcagaagttgaagcagatgttattttaatgggcaaaaataatgtagatggtgtatattctgcagatcctaaagtaaacaaagatgcggtaaaatatgaacatttaacgcatattcaaatgcttcaagaaggtttacaagtaatggattcaacagcatcctcattctgtatggataataacattccgttaactgttttctctattatggaagaaggaaatattaaacgtgctgttatgggtgaaaagataggtacgttaattacaaaataaatttagaggtgtaaaataatgagtgacattattaatgaaactaaatcaagaatgcaaaaatcaatcgaaagcttatcacgtgaattagctaacatcagtgcaggaagagctaattcaaatttattaaacggcgtaacagttgattactatggtgcaccaacacctgtacaacaattagcaagcatcaatgttccagaagcacgtttacttgttatttctccatacgacaaaacttctgtagctgacatcgaaaaagcgataatagcagctaacttaggtgtcaacccaacaagtgatggtgaagtgatacgtattgctgtacctgccttaacagaagaacgtagaaaagagcgcgttaaagatgttaagaaaattggtgaagaagctaaagtatctgttcgaaatattcgtcgtgatatgaatgatcagttgaaaaaagatgaaaaaaatggcgacattactgaagatgagttgagaagtggtactgaagatgttcagaaagcaacagacaattcaataaaagaaattgatcaaatgattgctgataaagaaaaagatattatgtcagtataaaactaatatacaatgacatattaaaatgccagtattaaacgataatgtaacatttaaaatgggcatgtttaattaaatcaaagatgcatgtgataatttaaattcacaatgagcataaaaatggtgtttaaacaagttaattaaacatatactatataaataataggcattaggtatattgctataataaagttatgtaatttttaacctcagtatgtatgtcacatttctggtgtaaactgtaccgagtcagactttggtacagtttttttatttgcttattcaatgcattaaatgagtatgataaaatgataatgattgtttagtaacttatactatatgacagagatgatcaggctcggaggaaagaccatgtttaaaaagctaataaataaaaagaacactataaataattataatgaagaattagactcgtctaatatacctgaacatatcgctattattatggatggtaatgggcgatgggctaagaaacgaaaaatgcctagaattaaaggtcattacgaaggtatgcaaacaataaaaaaaattactagggtagctagtgatattggtgttaagtacttaactttatatgccttttccactgaaaattggtcaagacctgaaagtgaagtaaattatattatgaatttgcctgtcaatttcttaaagacatttttaccggaactaattgaaaaaaatgtcaaagttgaaacaattggatttactgataagttgccaaaatcaacgatagaagcaataaataatgctaaagaaaaaacagctaataataccggcttaaaattaatatttgcaattaattatggtggcagagcagaacttgttcatagtattaaaaatatgtttgacgagcttcatcaacaaggtttgaatagtgatatcatagatgaaacatatataaacaatcatttaatgacaaaagactatcctgatccagagttgttaattcgtacttcaggagaacaaagaataagtaatttcttgatttggcaagtttcatatagtgaatttatctttaatcaaaaattatggcctgactttgacgaagatgaattaattaaatgtattaaaatttatcagtcacgtcaaagacgctttggcggattgagtgaggagtagtatagtatgaaagttagaacgctgacagctattattgccttaatcgtattcttgcctatcttgttaaaaggcggccttgtgttaatgatatttgctaatatattagcattgattgcattaaaagaattattgaatatgaatatgattaaatttgtttcagttcctggtttaattagtgcagttggtcttatcattattatgttgccacaacatgcagggccatgggtacaagtaattcaattaaaaagtttaattgcaatgagctttattgtattaagttatactgtcttatctaaaaacagatttagttttatggatgctgcattttgcttaatgtctgtggcttatgtaggcattggttttatgttcttttatgaaacgagatcagaaggattacattacatattatatgcctttttaattgtttggcttacagatacaggggcttacttatttggtaaaatgatgggtaaacataagctttggccagtaataagcccgaataaaacaatcgaaggattcataggtggcttgttctgtagtttgatagtgcctcttgcaatgttatattttgtagatttcaatatgaatgtatggatattacttggagtgacattgattttaagtttatttggtcaattaggtgatttagtggaatcaggatttaagcgtcatttcggcgttaaagactcaggtcgaatactacctggacacggtggtattttagaccgatttgacagctttatgtttgtgttaccattattaaatattttattaatacaatcttaatgctgagaacaaatcaataaacgtaaagaggagttgctgagataatttaatgaatctcagaactccttttgaaaattatacgcaatattaactttgaaaattagacgttatattttgtgatttgtcagtatcatattataatgacttatgttacgtatacagcaatcatttttaaaataaaagaaatttataaacaatcgaggtgtagcgagtgagctatttagttacaataattgcatttattattgtttttggtgtactagtaactgttcatgaatatggccatatgttttttgcgaaaagagcaggcattatgtgtccagaatttgcgatcggtatggggccaaaaatttttagttttagaaaaaatgaaacactttacactattaggttattgcctgttggtggatatgttcgtatggcaggagatggcttagaagagccaccagtcgagcctggtatgaacgttaaaattaaactgaatgaagaaaatgaaataacacatatcatattagatgatcatcataagtttcaacaaattgaagcgatcgaagttaaaaaatgtgattttaaagatgacttattcatagaaggtattactgcttatgataacgaaagacatcattttaaaattgctagaaagtctttctttgttgaaaatggtagcttagttcaaattgctccgagagacagacaatttgcacataaaaagccatggccgaaatttttaacattatttgcgggaccgttatttaactttatattagctttagtcctatttattggtcttgcatattatcaaggtacacctacttctactgtagaacaagtcgcagataagtatccagctcaacaagcaggcttacaaaaaggcgataaaattgtccaaattggcaaatataaaatatctgaatttgatgatgttgataaggcgttagataaagttaaagataataagacgactgttaaatttgaacgtgatggtaaaacaaagtcagttgaattaacacctaaaaagactgaaagaaaactgactaaagtaagttcagagacgaagtatgttctcggattccaaccagcgagtgaacatacactcttcaaaccaattgtatatggatttaaaagctttttaatcggtagtacttatatttttacagctgtagtcggtatgttggctagtatatttacgggcggattctcatttgatatgttaaatggtccagttggtatttatcataacgtcgactcagttgttaaagcgggtatcattagcttaattggttacactgcgttattaagtgtaaacttaggtattatgaatttaattcctattcctgcactagacggtggtcgtattttatttgttatatatgaagcgattttcagaaaaccagttaataaaaaagcggaaacaacgattatcgctattggtgccattttcatggtcgttattatgatattagtaacgtggaatgatattcgacgatatttcttataatttaggaggataaataattatgaagcaatccaaagtttttataccaacgatgcgtgatgtgccatcagaagcagaagcacaaagtcatcgtttattattgaaatcgggtttgataaaacaaagtacaagtgggatttatagttatttaccgctagcaacacgtgtgttaaataatattactgcaattgtgcgacaagaaatggaacgtatcgattctgttgaaattttaatgccagcgttacaacaagctgaattatgggaagaatcaggacgttggggtgcatatggcccagaattaatgcgtttacaagatagacatggaagacaatttgcattaggtccaacacatgaagaattagttacatcaatagtaagaaatgaattgaaatcatacaaacaattaccgatgacattattccaaattcaatctaaattccgtgatgaaaagagaccacgttttggtttacttcgtggtcgtgaatttattatgaaagatgcgtattcattccatgctgacgaggcatcattagatcaaacgtatcaagatatgtatcaagcgtatagccgtatttttgagagagttggcattaacgcaagaccagtagttgcagattcaggtgctattggcggtagccatacacatgaatttatggcattaagtgctatcggtgaggatacaatcgtttacagtaaagaaagtgactatgctgctaatatcgaaaaagcagaagtcgtttacgaaccaaatcataagcatactactgtgcaatctttagaaaaaattgaaacaccaaatgttaagactgcgcaaggattggcagacttcttaggtagaccagtagatgaaatcgttaaaacgatgattttcaaagttgatggcgaatatattatggttttagtgcgtggacatcatgaaattaatgacattaaattaaaatcttatttcggcacagataatattgaattagcaacacaagacgaaattgttaatttagttggtgcaaatcctggttcactaggtcctgtaattgataaagaaatcaaaatttatgcagataattttgtgcaagatttaaataatttagttgtcggggctaacgaagatggttatcacttaattaatgtaaatgtaggtagagacttcaacgttgatgaatacggcgatttccgttttattttagaaggcgaaaagttaagtgatggttcaggcgttgcacattttgctgaaggtattgaagttggtcaagtattcaaattgggtactaagtattcagaatcaatgaatgctacattcttagataaccaaggaaaagcccaacctttaattatgggttgttacggaattggaatttctagaacgctaagtgcgattgttgaacaaaatcacgatgataatggaattgtttggcctaaatcagttactccatttgatttacatttaatttctattaatcctaagaaagatgatcaacgagaactagcggatgcactatatgctgaatttaatactaaatttgatgtgttgtacgatgatcgtcaggaacgtgctggtgtcaaatttaatgatgccgatttaattggtttaccactgcgaattgttgttggtaaacgtgcatcggaaggtattgtagaagttaaagaacgtttaacaggtgatagcgaagaagtccacattgatgacttaatgactgtcattacaaataaatatgataacttaaaataattaagatcgaatgaattataagagtaggaaaaagctgaaagaaatctgatgcttatgtcctgctcttattatttttgatataatgattattcgatgaaaaatgactgaagacatagtataattaaagataaatttgttttaacaatattatgattagccaaatataaagcatttaattttctatcattactatgctcacataatctaaatattgttcgaacacgtaaaagtaatttctatttaaggtggtaattgtcttggcaatgacagagcaacaaaaatttaaagtgcttgctgatcaaattaaaatttcaaatcaattagatgctgaaattttaaattcaggtgaactgacacgtatagatgtttctaacaaaaacagaacatgggaatttcatattacattaccacaattcttagctcatgaagattatttattatttatacatgcaatagagcaagagtttaaagatatcgccaacgttacatgtcgttttacggtaacaaatggcacgaatcaagatgaacatgcaattaaatactttgggcactgtattgaccaaacagctttatctccaaaagttaaaggtcaattgaaacagaaaaagcttattatgtctggaaaagtattaaaagtaatggtatcaaatgacattgaacgtaatcattttgacaaggcttgcaatggaagtcttatcaaagcgtttagaaattgtggttttgatatcgataaaatcatattcgaaacaaatgataatgatcaagaacaaaacttagcttctttagaagcacatattcaagaagaagacgaacaaagtgcacgattggcaacagagaaacttgaaaaaatgaaagctgaaaaagcgaaacaacaagataacaacgaaagtgctgtcgataagtgtcaaattggtaagccgattcaaattgaaaatattaaaccaattgaatctattattgaggaagagtttaaagttgcaatagagggtgtcatttttgatattaacttaaaagaacttaaaagtggtcgtcatatcgtagaaattaaagtgactgactatacggactctttagttttaaaaatgtttactcgtaaaaacaaagatgatttagaacattttaaagcgctaagtgttggtaaatgggttagggctcaaggtcgtattgaagaagatacatttattagagatttagttatgatgatgtctgatattgaagagattaaaaaagcgacaaaaaaagataaggctgaagaaaagcgtgtagaattccacttgcatactgcaatgagtcaaatggatggtataccaaatattggtgcgtatgttaaacaggcagcagactggggacatccagccattgcggttacagaccataatgttgtgcaagcatttccagatgctcacgcagcagcggaaaaacatggtattaaaatgatatacggtatggaaggtatgttagttgatgatggtgttccgattgcatacaaaccacaagatgtcgtattaaaagatgctacttatgttgtattcgacgtcgagacaactggtttatcaaatcagtatgataaaatcatcgagcttgcagctgtgaaagttcataacggcgaaatcatcgataagtttgaaaggtttagtaatccgcatgaacgattatcggaaacgattatcaatttgacgcatattactgatgatatgttagtagatgcccctgagattgaagaagtacttacagaatttaaagaatgggttggcgatgcgatattcgtagcacataatgcttcgtttgatatgggcttcatcgacacgggatacgaacgtcttggatttggaccatctacgaatggtgttatcgatacattagaattatctcgtacgattaatactgaatatggtaaacatggtttaaatttcttagctaaaaaatacggtgtagaattaacgcaacatcaccgtgccatttatgatacagaggcaacagcttacattttcataaaaatggttcaacaaatgaaagaattaggcgtattaaatcataacgaaatcaacaaaaaacttagtaatgaagatgcatataaacgtgcaagacctagtcatgtcacattaattgtacaaaatcaacaaggtcttaaaaatctatttaaaattgtaagtgcatcattggtgaagtatttctaccgtacgcctcgaattccacgttcattgttagatgaatatcgtgagggattattggtaggtacagcgtgtgatgaaggtgaattatttacggcagttatgcagaaggaccagagccaagttgaaaaaattgccaaatattatgattttattgaaattcaaccaccggcactttatcaagatttaattgatagagagcttattagagatactgaaacattacatgaaatttatcaacgtttaatacatgcaggtgacacagcgggtattcctgttattgcgacaggaaatgcacactatttgtttgaacatgatggtatcgcacgtaaaattttaatagcatcacaacccggcaatccacttaatcgctcaactttaccggaagcacattttagaactacagatgaaatgttaaacgagtttcattttttaggtgaagaaaaagcgcatgaaattgttgtgaaaaatacaaacgaattggcagatcgaattgaacgtgttgttcctattaaagatgaattatacacaccgcgtatggaaggtgctaacgaagaaattagagaactaagttatgcaaatgcgcgtaaattgtatggtgaagacctgcctcaaatcgtaattgatcgattagaaaaagaattaaaaagtattatcggtaatggatttgcggtaatttacctaatttcgcaacgtttagttaaaaaatcattagatgatggatacttagttggttcccgtggttcagtaggttctagttttgtagcgacaatgactgagattactgaagtaaacccgttaccgccacactatatttgtccgaactgtaaaacgagtgaatttttcaatgatggttcagtaggatcaggattcgatttacctgataagacgtgtgaaacttgtggagcgccacttattaaagaaggacaagatattccgtttgaaacatttttaggatttaaaggagataaagttcctgatatcgacttaaactttagtggtgaatatcaaccgaatgcccataactacacaaaagtattatttggtgaggataaagtattccgtgcaggtacaattggtactgttgctgaaaagactgcttttggttatgttaaaggctatttgaatgatcaaggcatccacaaaagaggcgctgaaatagatcgactcgttaaaggatgtacaggtgttaaacgtacaactggacagcatccagggggtattattgtagtacctgattacatggatatttatgattttacgccgatacaatatcctgccgatgatcaaaattcagcatggatgacgacacattttgatttccattctattcatgataatgtattaaaacttgatatacttggacacgatgatccaacaatgattcgtatgcttcaagatttatcagggattgatccaaaaacaatacctgtagatgataaagaagttatgcagatttttagtacacctgaaagtttgggtgttactgaagatgaaattttatgtaaaacaggtacatttggagtaccagaattcggtacaggattcgtgcgtcaaatgttagaagatacaaagccaacaacattttctgaattagttcaaatctcaggattatctcatgggacagatgtgtggttaggtaatgctcaagaattaattaaaaccggtatatgtgatttatcaagtgtaattggttgtcgtgacgatatcatggtttatttaatgtatgctggtctagaaccatcaatggcttttaaaataatggagtcagtacgtaaaggtaaaggtttaactgaagaaatgattgaaacgatgaaagaaaatgaagtgccggattggtatttagattcatgtcttaaaattaagtacatgttccctaaagcccatgcagcagcatatgttttaatggcagtacgtatcgcatatttcaaagtacatcatccactttattactatgcatcttactttacaattcgtgcgtcagattttgatttaatcacgatgattaaagataaaacaagtatacgaaatactgtgaaagacatgtattctcgctatatggatcttggtaaaaaagaaaaagacgtattaactgtcttggaaattatgaatgaaatggcgcatcgaggttatcgaatgcaaccgattagtttagaaaagagtcaagcgttcgaatttatcattgaaggcgatacactaattccgccgttcatatcagttcctgggcttggcgaaaacgttgcgaaacgaattgttgaagctcgtgacgatggaccatttttatcaaaagaagatttaaacaaaaaagctggattatctcagaaaattattgagtatttagatgagttaggctcattaccgaatttaccagataaagctcaactttcgatattcgatatgtaaaatgaaataatcaaggtatttttaatgcgtatggcgtagttaaagaaatacaaaattgttgctggacacaaaattatgcctgtatttcttttcaacgtcttacgagtctattcgaatgtaaaggtgaaataaatgaacaaacttttacaagaatctctgattaatagtgaagtcatttgtttcaagcataaacttatgctataattaagttgcttaaaaattagtgaactcaggcagaagagtgggagattcccgctcttttctatttgccaaaaagggaggcctgtatgagtaaaattacagaacaagtagaagtgattgttaaaccaattatggaagacttgaattttgaacttgtagacgttgaatatgtcaaagagggtagagattattttcttagaatctctattgataaagaaggtggcgtagatttaaatgattgtacgctagcttctgaaaaaataagtgaagctatggatgcaaatgatcctattcctgaaatgtattatttagacgtagcgtcacctggtgcagaacgtccaattaaaaaagaacaagatttccaaaatgcaataactaaacctgtatttgtttctttatatgtaccaattgaaggtgaaaaggaatggttaggcattttacaagaagtcaataatgaaacaattgtagtacaagttaaaatcaaagcaagaacgaaagatatagagataccgagagacaaaatagcaaaagcacgtcacgcagttatgatttaacgtgatgaggaggaaaaaacgtgtcaagtaatgaattattattagctactgagtatttagaaaaagaaaagaagattcctagagcagtattaattgatgctattgaagcagctttaattactgcatacaaaaagaattatgatagtgcaagaaatgtccgtgtggaattaaatatggatcaaggtactttcaaagttatcgctcgtaaagatgttgttgaagaagtatttgacgacagagatgaagtggatttaagtacagcgcttgttaaaaaccctgcatatgaaattggtgatatatacgaagaagatgtaacacctaaagattttggtcgtgtaggtgctcaagcagcgaaacaagcagtaatgcagcgtcttcgtgatgctgaacgtgaaattttatttgaagaatttatagacaaagaagaagacatacttactggaattattgaccgtgttgaccatcgttatgtatatgtgaatttaggtcgtatcgaagctgttttatctgaagcagaaagaagtcctaacgaaaaatatattcctaacgaacgtatcaaagtatatgttaacaaagtggaacaaacgacaaaaggtcctcaaatctatgtttctcgtagccatccaggtttattaaaacgtttatttgaacaagaagttccagaaatttacgatggtactgtaattgttaaatcagtagcacgtgaagctggcgatcgctctaaaattagtgtcttctctgaaaacaatgatatagatgctgttggtgcatgtgttggtgccaaaggcgcgcgtggttgaagctgttgttgaagagctaggtggcgaaaaaatcgacatcgttcaatggaatgaagatccaaaagtatttgtaaaaaatgctttaagcccttctcaagttttagaagttattgttgatgaaacaaatcaatctacggtagttgttgttccagattatcaattgtcattagcgattggtaaaagaggacaaaacgcacgtctagctgctaaattaaccggctggaaaattgatattaaatcagaaacagatgcgcgagaagcgggtatctatccagtagttgaaactgaaaaagtaactgaagaagctgttgctttagaagatgctgacacaacagaatcaaccgaagaggtaactgatgtttcagttgaaacaaatgtagagaaagaatctgaataataggttggagtgaagtatctatgaaaatgaaaaaaattccgatgcgaaaatgtattctttcaaatgaaatgcatcccaaaaaagatatgattcgtgttgttgttaataaagaaggcgaaatctttgcggatgttactggaaagaaacaaggccgtggcgcatatgtttctaaagatgttgctatggttgaaaaagcacaacaaaaagaaattttagaaaaatattttaaagcatctaaagagcaattggatcctgtttacaaagaaattattagattaatttacagagaagagatcccaaaatgagtatagatcaaatattaaactttttaggattagcaatgagagctggtaaagtaaaaacaggtgaatcagtcattgttaatgagattaaaaaaggaagtttgaagctcgttattgttgcaaatgatgcgtctgataatacagctaaattaattacagataaatgtaagagttacaaagttccattcagaaagtttggaaatcgaaatgaattgggaatagcacttggaaaaggtgagcgtgttaatgtagggattactgacccaggctttgctaaaaagttgctatcaatgatagatgaatatcataaggagtgattatatgagtaaacaaagaatttacgaatatgcgaaagaattaaatctaaagagtaaagagattatagatgagttaaaaagcatgaatattgaggtttcaaatcatatgcaagctttggaagatgaccaaattaaagcattagataaaaagttcaaaaaagaacaaaagaacgacaataaacaaagcactcaaaataatcaccaaaaatcaaacaatcaaaaccaaaataaagggcaacaaaaagataacaaaaagaatcaacaacaaaataataaaggcaacaaaggcaataaaaagaataatagaaataataagaaaaataacaagaataataaaccacaaaatcaaccagctgctccaaaagaaataccatcaaaagtgacatatcaagaaggtattacagtaggcgaatttgcggataaattaaatgttgaatcatcagaaattatcaaaaaattattcttacttggtattgttgctaatatcaatcaatcattaaatcaagaaacaatcgaattaattgccgatgattatggcgttgaggttgaagaagaagttgtgattaatgaagaagatttatcaatctacttcgaagatgaaaaagatgatccagaagcaattgagagaccagcagttgtaacaattatgggacatgttgaccatggtaaaactactttattagattcaattcgtcatacaaaagttacagcaggtgaagcaggcggaatcactcaacatattggtgcatatcaaattgaaaacgatggcaaaaaaatcactttcttagatacaccgggacatgctgcatttacaacgatgcgtgcgcgtggtgcacaagtaacagatattacaattttagtagtagcagctgacgatggtgttatgccacaaacaattgaagcaattaaccatgctaaagaagcagaagtaccaattattgttgcagtaaataaaattgataaaccaacttcaaatcctgatcgagttatgcaagaattaactgaatatggtttaattcctgaagattggggcggcgaaacaattttcgttccactttctgcattaagtggtgatggtatcgacgatttattagaaatgataggattagttgcagaagttcaagaacttaaagcaaatcctaaaaaccgtgctgttggtacagttatcgaagctgaattagataaatcacgaggtccttctgcatcattattagtacaaaacggtacattaaatgttggtgatgcgattgtagttggtaatacttacggccgtatccgtgcaatggttaatgacttaggtcaaagaatcaaaacggctggtccatcaacgcctgttgaaattacaggtattaatgatgtgccacaagctggggatcgctttgttgtatttagtgatgaaaaacaagctcgtcgtattggtgaatcaagacacgaagctagcattgtacaacaacgtcaagaaagtaaaaatgtttcattagataacctgtttgaacaaatgaaacaaggtgaaatgaaagacttaaacgttattattaaaggtgatgttcaaggttctgttgaagctttagctgcatcattaatgaaaattgatgttgaaggcgtaaatgttcgtatcattcatacagcggttggtgcgattaacgagtcagacgtgacacttgctaatgcctcaaatggtattatcattggtttcaatgttcgtccagacagtggtgcaaaacgtgctgcagaagctgaaaatgttgatatgcgtttacacagagttatttataatgttatcgaagaaattgaatcagcgatgaaaggtttacttgatccagaatttgaagaacaagttatcggacaagctgaagttcgtcaaacattcaaagtttctaaagttggtactattgctggatgttatgttactgaaggtaaaattacgcgaaatgctggtgtacgtattattcgtgatggtattgttcaatatgaaggcgaattagatacacttaaacgtttcaaagatgatgctaaggaagttgcaaaaggttatgaatgtggtattacaattgaaaactacaatgaccttaaagaaggcgatgttatcgaagcatttgaaatggttgaaattaagcgttaattaaataaattacaagctaaaagtatagttaagattgatatgctccctataaatattgcactttttaagtgtctactttatagggagcatatttgatactagcttttggatttttattagaatagattacctattaaaagttacgttatatagacatgatttttgtataaaattttgtggtgacctagaatgctttttaatgacaaaatataatgtcgactattattggaaaattttctgttgaaatgcctatcttacggcaaactttatttgattttataggcttaatttattaaaataacgtgtgagctaaaataattgtttaagcattgttacactaaaaaatgcaaataacaattgaacttaaagataaagaggtgacaagaatgagcagtatgagagcagagcgtgttggtgaacaaatgaagaaggaattaatggatatcatcaacaataaagtcaaagatcctcgagttggttttattacaattacagatgttgttttaacaaatgatttatcgcaggctaaagtatttttaactgtattaggtaacgataaagaagtagaaaatacatttaaagcacttgataaagcaaaaggcttcattaagtctgaattaggttctagaatgcgattacgtattatgccggaattaatgtatgaatatgatcaatcaatcgaatatggtaataaaattgaacgaatgattcaagatttacgcaaacaagatagataatttagtgttaggtatctggaaaatgtttgataatttcttaatatcggtatattaacattaaacagttaatacatagatgtgtagaaatagttaacattttccagtttttttatggataaattcagttaatacgctattaaaatatattttaaaaaaagaaggtgacaacatgtataacggtatattaccagtatataaagaacgtggtttaacaagtcatgacgtcgtattcaaattgcgtaaaatattaaaaactaaaaaaatagggcacactggtacgcttgatcctgaagttgcaggcgtgttaccggtatgtataggtaatgcaacgagagttagtgattatgttatggatatgggcaaagcttatgaagcaactgtatcgataggaagaagcacaacgactgaagatcaaacgggtgatacattggaaatgaagggtgtacattcagctgatttcaacaatgacgatattgaccgcttgttagaaaattttaaaggtgttattgaacaaattccgccaatgtattcatcagtcaaggtgaatggtaaaaaattatatgaatatgcgcgtaataatgaaacagttgaaagaccaaagcgtaaagttaatattaaagacattgggcgtatatctgaattagattttaaagaaaatgagtgtcattttaaaatacgcgtcatctgtggtaaaggtacatatattagaacgctagcaactgatattggtgtgaaattaggttttccggcacatatgtcgaaattaacgcgaatcgagtctggtggatttgtgttgaaagatagccttacattagaacaaataaaagaacttcatgagcaggattcattgcaaaataaattgtttcctttagaatatggattaaagggtttgccaagcattaaaattaaagattcgcacataaaaaaacgtattttaaatgggcagaaatttaataaaaatgaatttgataacaaaattaaagaccaaattgtatttattgatgatgattcagaaaaagtattagcaatttatatggtacaccctacaaaagaatcagaaattaaacctaaaaaagtctttaattaaaggagatagaatttatgaaagtcatagaagtgacacatcctatacaatctaaacagtatattacagaggatgttgcaatggcattcggatttttcgatggcatgcataaaggtcatgacaaagtctttgatatattaaacgaaatagctgaggcacacagtttaaaaaaagcggtgatgacatttgatccgcatccgtctgtcgtgttgaatcctaaaagaaaacgaacaacgtatttaacaccactttcagataaaatcgaaaaaattagccaacatgatattgattattgtatagtggttaatttttcatctaggtttgctaatgtgagcgttgaagattttgttgaaaattatataattaaaaataatgtaaaagaagtcattgctggttttgattttacttttggtaaatttggaaaaggtaatatgactgttcttcaagaatatgatgcgtttaatacgacaattgtgagtaaacaagaaattgaaaatgaaaaaatttctacaacttatattcgtcaagatttaatcaatggtgagttgcaaaaagcgaatgatgctttaggctatatttattctattaaaggcactgtagtgcaaggtgaaaaaaggggaagaactattggcttcccaacagctaacattcaacctagtgatgattatttgttacctcgtaaaggtgtttatgctgttagtattgaaatcggcactgaaaataaattatatcgaggggtagctaacataggtgtaaagccaacatttcatgatcctaacaaagcagaagttgtcatcgaagtgaatatctttgactttgaggataatatttatggtgaacgagtgaccgtgaattggcatcatttcttacgtcctgagattaaatttgatggtatcgatccattagttaaacaaatgaacgatgataaatcgcgtgctaaatatttattagcagttgattttggtgatgaagtagcttataatatttagagttgcgtatagttatataaacaatctataccacacctttttcttagtaggtcgaatctccaacgcctaactcggattaaggagtattcaaacattttaaggaggaaattgattatggcaatttcacaagaacgtaaaaacgaaatcattaaagaataccgtgtacacgaaactgatactggttcaccagaagtacaaatcgctgtacttactgcagaaatcaacgcagtaaacgaacacttacgtacacacaaaaaagaccaccattcacgtcgtggattattaaaaatggtaggtcgtcgtagacatttattaaactacttacgtagtaaagatattcaacgttaccgtgaattaattaaatcacttggtatccgtcgttaatcttaatataacgtctttgaggttggggcatatttatgttccaaccttaatttatattaaaaaagctttttacaaatattaacatttattatatgttaagctaatattgagtgaataataaggttacaatgagataaagatgatataagtacacctagagtaataatcaagatattaaaaataaagtatgttttttaaaaaaatataacttatatttatactgataagggtgggacgataagtctattttgtaaataatagatggatatcccgctctctttttttccaattcaatattttataactaatattaaaatacgataataaatgatatgatataactattagattcaagagaggagatttataatgtctcaagaaaagaaagtttttaaaactgaatgggcaggaagatctttaacgattgaaacagggcaattagctaaacaagcaaatggtgctgtattggttcgttatggagatacagtcgtgttatcgacggcaactgcatcaaaagaacctcgtgatggagatttcttcccattaacagtgaactatgaagaaaaaatgtacgctgcgggtaaaattcctggtggatttaaaaagagagaaggacgtcctggtgacgatgcaacattaactgcgcgattaattgatagaccaattagacctttattccctaaaggatataagcatgatgttcaaattatgaacatggtattaagtgcagatcctgattgttcaccacaaatggctgcaatgattggttcatctatggcgcttagtgtgtcggatattccattccaagggccaatcgccggtgtaaatgtgggttatattgacggtaaatatatcattaacccaacagtagaagaaaaagaagtttctcgtttagaccttgaagtagctggtcataaagatgcagtaaacatggtagaggcaggcgctagtgagattactgaacaagaaatgttagaggcgattttctttggtcatgaagagattcaacgtttagttgatttccaacaacaaatcgtcgaccacattcaacctgttaaacaagaatttattccagcagagcgtgatgaagcgctagttgaacgtgtaaaatctttaactgaagaaaaaggacttaaagaaacagttttaacatttgataaacaacaacgagatgaaaatcttgataacttaaaagaagaaatcgtcaatgaatttatcgatgaagaagatccagagaatgaattacttattaaagaagtttatgcaattttaaatgaattagtgaaagaagaagttcgacgtttaattgcagatgaaaaaattagaccagacggccgtaaacctgatgaaatccgtccattagattctgaagttggtattttacctagaacgcatggttcaggtctatttacacgtggtcagactcaagcactttcagttttaacattaggtgctttaggcgattatcaattaattgatggtttaggacctgaagaagaaaaaagattcatgcatcattataacttcccgaacttttcagtaggtgaaactggtccagtacgtgcgccaggtcgtcgtgaaattggccatggtgcgttaggtgaaagagcattaaaatatattattcctgatactgctgatttcccatatacaattcgtattgtaagtgaggtacttgaatcaaacggttcatcatctcaagcgtcaatttgtggatcaacattagcattaatggatgcgggagtaccgattaaagcaccagttgctggtattgctatgggccttgttacacgtgaagatagctatacgattttaactgatatccaaggtatggaagatgcattaggtgatatggactttaaagtcgctggtactaaagaaggtattacagcaatccaaatggatattaaaattgacggtttaacgcgtgaaattatcgaagaggctctagaacaagcgagacgtggtcgtttagaaataatgaatcatatgttacaaacaattgatcaaccacgtactgaattaagtgcttacgcgccaaaagttgtaactatgacaattaaaccagataagattagagatgttatcggacctggtggtaaaaaaattaacgaaattattgatgaaacaggcgttaaattagatattgaacaagatggtactatctttattggtgccgttgatcaagctatgataaatcgtgctcgtgaaatcattgaggaaattacacgtgaagcggaagtaggtcaaacttatcaagccactgttaaacgtattgaaaaatacggtgcgtttgtaggcctattcccgggtaaagatgcgttgcttcacatttcacaaatttcaaaaaatagaattgaaaaagtggaagatgttttaaaaatcggtgacacaattgaagttaagattactgaaattgataaacaaggtcgagtaaatgcttcacacagagcattagaagaataatatttaaagtcatatgacgacaatgtatcgtcatgtgatttttttatgccattttttacgaagtgatccattttgaatttgttgtattgaacattttaaaacgctttattattttgtgtgcaactgttaattatcctgtatgtatagtgattaatagtgtacatcaagtgttttttaacttataatgaatagtgagtttatatatggacgggtaacaaatttaggaggtaagattttgagtttaataaagaaaaagaataaagatattcgcattataccattaggcggtgttggcgaaattgctaaaaatatgtatatcgttgaagtagacgatgaaatgtttatgttagatgctggacttatgtttccagaagacgaaatgctaggtattgatattgttataccagacatttcatacgtacttgaaaataaagataaattgaaggggatattccttacacacggacatgagcacgcgattggtgcagtgagctatgttttagaacaattagatgcaccagtatatggatctaagttgacaatagcgttaattaaagaaaatatgaaagcccgtaatattgataaaaaagttcgctactacacagttaataatgattcaattatgagattcaaaaacgtgaatattagtttctttaatacgacacacagtattcctgatagtttaggtgtttgtattcacacttcatatggtgccattgtgtatacaggtgaatttaagtttgaccaaagtttacatggacattatgcaccagatattaaacgtatggcagagattggtgaagaaggcgtatttgtcttaatcagtgattctactgaggcagagaaacctggatataatactccggaaaatgtgattgaacatcatatgtatgatgcttttgcaaaagtgcgaggtcgcttgatagtttcatgttatgcttcgaactttatacgtattcagcaagttttaaatattgctagcaagctaaatcgtaaagtgtcatttttaggaagatcacttgaaagttcatttaatattgctcgtaaaatggggtatttcgacattcctaaagatttgctaattcctataacagaagttgataattatcctaaaaatgaagtgataattatagctactggtatgcaaggagaacctgtagaagccttaagtcaaatggcgcaacataagcataaaattatgaatatcgaagaaggtgattctgtatttttagcaattacggcttctgctaatatggaagttatcattgcgaatacattaaatgagcttgtacgtgctggcgcacatattattccaaataacaagaagattcatgcttcaagtcatggttgcatggaagaattaaaaatgatgattaatattatgaaacctgaatactttattcctgtacaaggtgaatttaaaatgcagatagcacatgcgaagctagcagctgaagcaggtgttgcaccagaaaagattttccttgtggaaaaaggagatgtcattaattacaacggtaaagatatgatattaaatgaaaaggtaaattcaggaaatattttaatagatggtattggtattggggatgtaggaaatatcgtgttgagagaccgtcatcttttagcagaagatggtatctttattgctgtagtaacgttagatcctaaaaatagacgtatagctgcgggacctgaaattcaatctcgtggatttgtatatgtacgtgaaagtgaagacttattacgtgaagcagaagagaaagtacgtgaaatagtagaagctggtttacaagaaaaacgcatagaatggtctgaaattaagcaaaatatgcgtgatcaaattagtaaactattattcgaaagtacaaaacgtcgtcctatgattattccagtaatttctgaaatttaatcaaaaagtcattaacataaaagaggtcagaacaagtcaccgaaatataatggttgtcatggacaatttacttatattttatgatggtcaattgaaaggggtaacgattaatctgttatcttaagtaaattgatacatagatgatattgttctaacctctttcatcgtctgtttggactacatattctaaacatcaaataggaaattatatataataacgtcgttttaactaaggtaacataaggaggtgcgtcaattggcacaagcaaaaaagaaatcgacagctaagaaaaaaacaacatcaaaaaaaagaacaaattcgaggaaaaagaagaatgataatccgatacgttatgtcatagctattttagtaattttattaatggtgttgggtgttttccaattaggaataataggtcgtctaattgacagcttctttaattatttatttgggtacagtagatatttaacatatattttagtactcttagcaactggttttattacatactctaaacgtattcctaaaactagacgaacggctggttcgattgtattgcaaattgcattgctatttgtatcacagttagtttttcattttaatagtggtatcaaagctgaaagagaacctgtactttcttatgtatatcagtcataccaacacagtcattttccaaattttggtggcggtgtattaggcttttatttattagagttaagcgtacctttaatttcattatttggtgtatgtattattactattttattattatgctcaagtgttattttattaacaaaccatcaacatcgtgatgttgcaaaagttgcactggaaaatataaaagcttggtttggttcatttaatgaaaaaatgtcggaaagaaaccaagaaaaacaattgaagcgtgaagaaaaagcgagacttaaagaagaacaaaaggcacgtcaaaatgaacagccacaaataaaagatgtgagtgattttacggaagtgcctcaagaaagagatattccaatttatgggcatactgaaaatgaaagtaaaagccagagtcaaccaagtcgaaaaaaacgagtgtttgatgcagagaatagttcgaataacatcgtaaatcatcatcaagcagatcagcaagaacaattaacagaacaaactcataacagtgttgaaagtgaaaacactattgaagaagctggtgaagttacgaatgtgtcgtatgtagttccaccgttaactttacttaatcaacctgcaaaacaaaaagcaacatctaaagctgaagtgcaacgtaaaggacaagtactagagaatacattaaaagattttggggtaaatgcaaaagtgacacaaattaaaattggtcctgcagtaactcaatatgaaattcaaccagctcaaggggttaaagtgagtaaaattgtaaacttgcataatgatattgcattagctttagcagcaaaagatgttagaatcgaagcgccaatacctggtcgctctgcagtaggtattgaagtgccaaatgagaaaatttcattagtttcactaaaagaagttttagatgaaaaattcccgtctaataataaactagaagttggattaggaagagatatatcaggtgatccaattactgttccactaaatgaaatgccacacttattggtggcaggatcgacgggtagtggtaaatctgtttgtataaatggtattattacaagtattttattaaatgctaagccgcatgaagttaaacttatgttaatcgatccgaaaatggttgaactaaatgtttataacggaattccacatttattaattccggttgttacaaatcctcataaagctgctcaagctttagaaaaaattgtagctgagatggaaagacgttatgatttattccaacattcatcaactagaaatattaaaggttataacgaattaatccgtaagcaaaatcaagaattagatgagaagcaaccagaattaccttatatcgttgttattgtagatgagcttgcagatttaatgatggtagctggtaaagaagttgaaaatgcgattcaacgtatcacacaaatggcacgtgcagcaggtatacatttgattgtagcgacacaaagaccttctgtggatgtaattacaggtatcattaaaaataatattccatctagaattgcttttgctgtgagttctcaaacagattcaagaactattattggtactggtggcgcagaaaagttacttggtaaaggtgacatgttatacgttggaaatggtgattcatcacaaacacgtattcagggggcgtttttaagtgaccaagaggtgcaagatgttgtaaattatgtagtagaacaacaacaggcaaattatgtaaaagaaatggaaccagatgcaccagtggataaatcggaaatgaaaagtgaagatgctttatatgatgaagcgtatttgtttgttgttgaacaacaaaaggcaagtacatcattgttacaacgccaatttagaattggttataatagagcatctaggttgatggatgatttagaacgcaatcaggtaatcggtccacaaaaaggaagcaagcctagacaagttttaatagatcttaataatgacgaggtgtaaaaaaatgtcagaaatgaatgcggtatataacgttaaacaatacattttaaatttgattaagcaaaataaattggaatatggtgaccaacttccaagtaatttatcaattgccagagaattaaatgtaaaaaccgacgatgtttatgaagcaattcaggcattgattactgaacaagtcattaaagataattttgaagagggcacaagtgttaagtcactgccccctttcttttatccattgaatgaacttataagtattgggcaaatgattaaaaatgcaggatttgaatgcggaactgaatacttaaattttgatgagcaaccagcaactatgttagatgcaaatttgttgagcgttgaagaagggtatccagtaaccattatagaacgattacgaactgccgatggagaaccggtcgtctattgtttagataaaattgctaaaaaagaattaacatgtacagagtatcaaatgagcaatggatcgattctaagtgcgataaaagaacaaagtaatcataatatttgttatgctgatacagaaattgaagcggtaaattatgaacctcgaatatccgaagtactgaatgcttcgccacacgaaggtttgattttattaaaaattacgcactacaatgaatcagatgaacctattttgtattcattaaattatatgaaaaatagcttagttcaatttaaaatcactagaaaaatatagatgtaagaagatatagaggaggctatatatttgagtagacaatctcaaccaaatatacatatcaaagtttcaccaacaactaaatttaaaacaactactatagtttttaaatttatggcacctttagaatatgacacaataacagctagatcattattaagcaaattattagttcgagcaactaagaaatggccaaccgataagtcgtttaataatcacttagccgatttatatggtgcgtatgtgaatagtacaatttcaaaattcaaagatcagcatgtcattacattttcattagaaattgttaatgaacgttatttaagaaacggtgaatcattatttaatcaaggattagatttattacaagaaatcatttggaatccattaattgaaaataaagcattcaatgataattttgttaaccaagagaaaacattattagccaaaaaaatagaagcaatggtagataacaaagcacaatattcgtttttaaaattactcgaccatatgtttgaaaatgaagcatacaaatacttatctacaggacaactagaacaaatcccacatattactgctgaaacactatatcatacatatcaatcaatgattaataatgatcaatgttctgtttatgttgtcggcaatgtagaacctgaaagtgttgagaaacaaatacgtgaaaaatttgcacttaaaccattcgataaacatcaattccaacattctactcatcatttacacgatgaagaagttgattatattgttgaatatgatgacgtggatcaagctaaattaaatatgggataccgttttccaacacaatatggacaaagtggatatgctgcctttgttgtatttaacatgatgtttggaggagatccttcatctgttttatttaatgaagtgcgagaaaagcaaagtttagcgtactctatacattcacaaattgatggcaaaaatggctatttatttgttttgagtggggtttcaagtgataagtacgaaactgcaaaagacactattataagtgaatttgaaaaaataaaagcaggagatttcactgaagaaaaattagagttagctaaaaaagtaatcatttctcatcgatatgaatctgaagatcgtccgaaaagtattatagagattatgcataaccaaatattattagagcaaccacaaagcaaagaaacatttataaatgatatacagaaggtaagtcgcgaagatattgtttctgttgctgaaaaagcatttttagatacaatctatgtgttgacaaaaggaggggataaataatgaaagagcgttattatgaattaatagacgaaagagtattcgaacaagaattagaaaatggtttacgattatttgttatccccaaaccaggttttcaaaagacatttgtcacttacactacacaatttggttcattagataatcaattcaaaccacttggacaagaccaatttgttactgtacctgatggagttgctcactttttagaacataaattatttgaaaaagaagaagaagacttatttactgcgtttgctgaagataatgcacaagcaaatgcgtttacaagctttgatcgtacaagctacttgttcagtgcaactgataatattgaaaacaacattaaacgtttacttacaatggttgaaacgccttattttacaaaagaaactgttgataaagaaaaaggtattattgcagaagaaataaaaatgtatcaagaacaacctggatataaattaatgtttaatacattgcgtgcaatgtatcagcaacatccaatacgtgttgatattgccggtagtgtagaaagtatatacgatattacaaaagatgatttgtatctatgttatgaaacgttttatcatccatcaaatatggttttatttgttgttggtgatgtgaatccagaagaaatatgtcgaatagtaaaacaacacgaggatgctcgtaataaagttaaccaacccaaaatcgaacgaggacttgttgatgaaccggaggatgttaaagaagcatttgttactgaatctatgaaaattcaatcaccaagactaatgcttggttttaaaaataaaccattacaagaagcgcctcaaaaatatgtacaacgtgatttagaaatgtcattattctttgagttgatttttggggaagaaacagatttttatcagaatttattaaacgaaggacttatcgatgatacatttggttatcaatttgtactagagccgacgtatagtttttcaatcgtgacaagcgctactgaagaaccagataaattaaaaaaattattattagatgagttgcgtgataaaaaaggcaatttccaagatgcagaagcatttgaacttttgaaaaagcaatttataggtgagttcatatcaagtttaaactcacctgaatatattgctaatcaatatactaaattgtattttgaaggtgttagtgtgtttgacatgttagacattgttgaaaacatcacgttagatagtattaacgaaacgtcatcgttatatttaaatttagatcagcaagtcgatagtcgtttggagattaaaaagtaatgaaagcattagtattaggtggttctggttcaattggttctgagatagtcaaacaattattaactgatggatttgaagtttatgtgcaatattatcgtactgatataaatgaattaactagcaaatttaacgatgataaagttcattttatacaagcggatttatctcaaacaattgatattgacaaaacatttggtgacattaaatcattagactgtttaatatatgcaagtggtcagtctttatatggtgttttacaagatatgaaagaccatgatattgatgcatgttatcagttaaatgtcttgcaattaattcgattatgtagatatttcgttgatgttttacgtcaaagtgacaatggaagaattattgtaatttcatcaatttggggtgagacaggagctagtatggaaactatttattcgacgatgaaaagtgcacaattaggtttcgttaaggcgcttagtcaagagcttgcactaacatcagtgacagtaaatgctatctcacctggatttgtagctggtaatatggcaagcgagtggcaagaagatgaacttcaagcaatgataactgaattaccacaacagcgattggttttaccgagtgaggttgctcatacatgcgcctatttatatcacccaaatgctagaagtgttactggaactatacagaaagttaatggtgcttggtatatttaaaatatagaactatttttatgagcaaatgtttttatgattgatgttataatatgaatattacaatgaatcataatttgttaattaaacaaggggtgaggttcaccatgacagttgcagagaaaaaagaatggtacttagaatacgaaattgaaattaatagaccgggtcttttaggtgatgtatctagtttattaggtatgttaggtataagtattgttacaattaatggtgttgatcaaggtaaacgaggccttttaattaaaacagacaatcttgaaaaagttgaacgttttgagcaaatagctcgtggtataaatgaaattgaaataacaaagcttaaaaaaccagaattaagagaccgtcttgcagttagacatggtagatatattgagcaagatgcaaaagataagaaaacctttcgatttgagcgtgaagatttaggcttgttagtagactttttagctgaattgttcaaagaagaaggtcataagttgattggcattagaggtatgccacgggttggtaaaactgaatcaattgttgcgggaagtgtttgtgcacataagagatggttatttattagttctactttaataaaacaaactgtacgtagctctctaatcaaaggggaatatgatgccaatcatgtatatattattgatggtgcagttactgccagagaatctaatccaaaacatcaagagcttgttaacgaagttatgacgttaccatcaatcaaagtcgttgaacatccagatttatttgttgaaacaagtacttgtacaatggaagattttgactatattatcgaattgagagaaaatgaaaatcaagaaatacaatacgaagaaatgaagaaacagacagtccaaagtaagaataatttagattttggagatccatttggtggtggttttggtttcttcgagtaagtgtaaggaggctatgaattgaaaacggtcggtgaagcgctaaaaggtagacgtgaaaggttaggaatgactttaacagaattagagcaacgtactggaattaaacgtgaaatgctagtgcatattgaaaataatgaattcgatcaactatcgaataaaaattacagcgaaggatttattagaaaatatgcaagcgtagtaaatattgaacctaaccaattaattcaagctcatcaagatgaaattccatcgaaccaagccgaatgggacgaagtaattacagttttcaataataataaagacttagattataagagtaaatcaaaagagccaatacaattattagtaatcatgggtattacagttttaataactttattgttatggatcatgttagttttaatattttaacagaaataaattagtgagaaatgaggatgtataatgaatattccgaatcagattacggtttttagagtagtgttaataccagtttttatattgtttgcgttagttgattttggatttggcaatgtgtcatttctaggaggatatgaaataagaattgagttattaatcagtggttttatttttatattggcttcccttagcgattttgttgatggttatttagctagaaaatggaatttagttacaaatatggggaaatttttggatccattagcggataaattattagttgcaagtgctttaattgtacttgtgcaactaggactaacaaattctgtagtagcaatcattattattgccagagaatttgccgtaactggtttacgtttactacaaattgaacaaggattcgtaagtgcagctggtcaattaggtaaaattaaaacagcagttactatggtagcaattacttggttgttattaggtgatccattggcaacattgattggtttgtcattaggacaaattttattatacattggcgttatttttactatcttatctggtattgaatacttttataaaggtagagatgtttttaaacaaaaataaatatttgtttatactagatttcattttcatatggaatctagttttttaatcccaattttagaaattagccacgcaattgtttataatgatgggagtgggacagaaatgataaagagccactaatgatttattatgtagtggttcttacacattagccacagctaatgtgtacttaaaaataggaatacatgagtaaaactcatgcataagaaatactaatttctatagaaaaagtatttctttatcgtcgtcccaccccaacttgcattgtctgtagaaattgggaatccaatttctctttgttggggccccgccaacttgcacattattgtaagttgactttccgccagcttctatgttggggccccgccccaactcgcattgcctgtagaatttcttttcgaaattctctgtgttggggcccacaccccaacttgcattgcctgtagaatttcttttcgaaattctctgtgttggggcccacaccccaacttgcattgcctgtagaatttcttttcgaaattctctgtgttggggcccacaccccaaattgcattgcctgtagaatttcttttcgaaattctctgtgttggggcccctgactagaattgaaaaaagcttgttacaagcgtattttcgttcagtcaacttctgccaatataactttgtagagcattgaacattgatttatgtctcaggctcttgttcatttttttaggaaaatgtgttgtagcatctgatacattgaatttaaaattgatgtgaatttttaaatggaatacatgaaaaaagaattaaacgatacaagggggatataaatgtcaattgccattattgctgtaggctcagaactattgctaggtcaaatcgctaataccaatggacaatttctatctaaagtatttaatgaaattggacaaaatgtattagaacataaagttattggagataataaaaaacgtttagaatcaagtgtacgtcatgcgttagaaaaatatgatactgttattttaacaggtggcttaggtcctacgaaagatgacttaacgaagcatacagtggcccagattgttggtaaagatttagttattgatgagccttctttaaaatatattgaaagctattttgaggaacaaggacaagaaatgacacctaataataaacaacaggctttagtaattgaaggttcaactgtattagcaaatcatcatggaatggctccaggaatgatggtgaattttgaaaacaaacaaattattttattaccaggtccaccgaaagaaatgcaaccaatggtaaaaaatgaattgttgtcacattttataaaccataatcgaattatacactctgaactattaagatttgcgggaataggtgaatctaaagtagaaacagtattaatagatcttatcgataaacagactaatcctacgattgcgcctttggcaggaagtcatgaagtatatattagattgactgcaaatgccgactcaaaagaacaagcacaatcattgattcaacctgttaagcaagaaattcttgatcgtattggagaatattattatggttcagatgacacattaattgagcaagctgtaataaagaaaattcatgaaccttttgtaatatatgatggtattactaatggtgctttatatcatcgattgaaagaagtggatttaaacgatgttctaaagggtatgattaatcacaatgaaaactttgttgatattaataaacctattgagcagcaattaaaagatgcagtgcaatttgttaataaattatttaatgtgccatcagcaattattctattagagtatgatggtgtagtctatataggctatgataataacttagaatttaaaactgagcaatttaaaatgtctaaatctagaaatttattaaagaacagaagtcaaaattatgcgcttataagattattaaattggcttagaacaacaaattaattgtattatcgataaaaatataagtacgtttgttcgtttttgcgttttgatttcaagactttatacgaacaaatattcgcaaagcacttgtattttattttgaatccttgtatagtattggtaagataattaaaagatagcaatttcaattaggaggtctcgctttggataacgatcgtcaaaaagctttagatacagtaattaaaaatatggagaaatctttcggtaaaggtgccgtaatgaagttgggtgacaatataggtcgccgagtttcaactacatcaactggttcagttacattagataatgcgctaggtgtaggtggctatcctaaaggacgaattattgaaatttatggtcctgaaagttctggtaagacaacagtagcgcttcacgctatcgctgaagtacaaagtaatggcggggtggcagcatttatcgatgctgaacatgctttagatccagaatatgctcaagcattaggcgtagatatcgataatttatatttatcgcaaccggatcatggtgaacaaggtcttgaaatcgccgaagcatttgttagaagtggtgcagttgatattgtagttgtagactcagttgctgctttaacacctaaagctgaaattgaaggagaaatgggagacactcacgttggtttacaagctcgtttaatgtcacaagcgttacgtaaactttcaggtgctatttctaaatcaaatacaactgctattttcatcaaccaaattcgtgaaaaagttggtgttatgttcggtaatccagagactacaccaggtggacgtgctttaaaattctatagttcagtaagactagaagtacgtcgtgcagaacagcttaaacaaggacaagaaattgtaggtaatagaactaaaattaaagtcgttaaaaataaagtggcaccaccatttagagtagctgaagttgatattatgtatggacaaggtatttctaaagagggtgaacttattgatttaggtgttgaaaacgacatcgttgataaatcaggagcatggtattcttacaatggcgaaagaatgggtcaaggtaaggaaaatgttaaaatgtacttgaaagaaaacccacaaatcaaagaagaaattgatcgtaaattgagagaaaaattaggtatatctgatggtgatgttgaagaaacagaagatgcaccaaagtcattatttgacgaagaatagtacacaaatttatatctatagttaaacttagcaaatatccttataggattgattgaaagtgatattcatctcataaagctggaataatatctaactttatgggatgcgcttcaaatcgagactataaggttttttattttatttattattacattatcaatagttttataatcgagcttcaaaactttagaaaatagtagaaatagcattcaatatagtgcaaaagtgcaaattgataacttgacacttatctcctataaaccgtacaattaatttgtatgatttatatataatttcataaagtcatattgaatttcatataaagagcaaaccctagaaaaggaggtgtttgtgtgaatttattaagcctcctactcattttgctggggatcattctaggagttgttggagggtatgttgttgcccgaaatttgttgcttcaaaagcaatcacaagctagacaaactgccgaagatattgtaaatcaagcacataaagaagctgacaatatcaaaaaagagaaattacttgaggcaaaagaagaaaaccaaatcctaagagaacaaactgaagcagaactacgagaaagacgtagcgaacttcaaagacaagaaacccgacttcttcaaaaagaagaaaacttagagcgtaaatctgatctattagataaaaaagatgagattttagagcaaaaagaatcaaaaattgaagaaaaacaacaacaagtagatgcaaaagagagtagtgttcaaacgttaataatgaagcatgaacaagaattagaacgcatctccggtctcactcaagaagaagctattaatgagcaacttcaaagagtagaggaagaactgtcacaagatattgcagtacttgttaaagaaaaagaaaaagaagctaaagaaaaagttgataaaacagcaaaagaattattagctacagcagtacaaagattagcagcagatcacacaagtgaatcaacggtatcagtagttaacttacctaatgatgagatgaaaggtcgaatcattggacgagaaggacgaaacatccgcacacttgaaactttaactggcattgatttaattattgatgacacaccagaagcagttatattatctggttttgatccaataaggagagaaattgctagaacagcacttgttaacttagtatctgatggacgtattcatccaggtagaattgaagatatggtcgaaaaagctagaaaagaagtagacgatattattagagaagcaggtgaacaagctacatttgaagtgaacgcacataatatgcatcctgacttagtaaaaattgtagggcgtttaaactatcgtacaagttacggtcaaaatgtacttaaacattcaattgaagttgcgcatcttgctagtatgttagctgctgagctaggcgaagatgagacattagcgaaacgagctggacttttacatgatgttggtaaagcaattgatcatgaagtagaaggtagtcatgttgaaatcggtgtagaattagcgaaaaaatatggtgaaaatgaaacagttattaatgcaatccattctcaccatggtgatgttgaacctacatctattatatctatccttgttgctgcggcagatgcattgtctgcggctcgtccaggtgcaagaaaagaaacattagagaattatattcgtcgattagaacgtttagaaacgttatcagaaagttatgatggtgtagaaaaagcatttgcgattcaggcaggtagagaaatccgagtgattgtatctcctgaagaaattgatgatttaaaatcttatcgattggctagagatattaaaaatcagattgaagatgaattacaatatcctggtcatatcaaggtgacagttgttcgagagactagagcagtagaatatgcgaaataatttttgtctccctcacaaattagtgagggagcttttttcagttgtagtctcaatctagttagacagcactttattggtaataactatataaaacagtagttatttgaaagtaagacggaccttatattaaataagaagttattgcttttaataaaaatgctttaggcttcataattactatatttatattatgtaaacctataaagatgattgcttttctatccaataaaaaagaagagaagatgtaacacatcttctcttctgcaatattaattaggatttatttctaagttgagttattttaattgtaaatcggttttctttaattcttttataacttctgcagtatcataacaatttgttgcaattgttgaatatctctctgctaaacgatatgcattaatgtaaagctttaaactttctttagctatatcctctgcatcttcgaattttgatgggttagacataaccactaattctgcaaatttttctggatcaatattaatagacatgtatttatttacaactcctatttattttgatgtcttaatactaacatattgaagttttcagacaaagtaatgtctctttataattgaagaaaaataattcaaagaatttaatatttactttaaatattagaacgtatgaattaaactagtatttatgagaggatgaacaaaacatgagaataatgtttataggggatatcgtaggtaaaattggacgagacgcaattgaaacgtacatacctcaactgaagcaaaagtataaaccaacagttacaattgtaaatgctgaaaatgcagcacatggtaaaggtttgactgaaaaaatatataaacaattactaagaaatggtgtagatttcatgactatgggtaatcacacatatggtcaacgtgaaatttatgattttatagatgaagcaaaacgactagtaagaccagcgaattttccggatgaagcgccgggaattggtatgagatttatacaaattaatgatattaaacttgcagttattaatctgcaaggaagagcgtttatgccagatattgatgatccttttaaaaaggcagatcaattagtcaaggaagcacaagaacaaactccgtttatatttgttgattttcatgcagaaacaacttctgaaaagtatgcaatgggatggcatttagatggtagagctagcgctgttgttggaacgcatacacacattcaaactgcagatgaacgtattttaccaaaggggacagggtatataacggatgttggtatgacaggcttttatgacggcattttaggaataaataaaacagaggtaattgagcgttttatcactagtttgccacaaagacatgttgttccaaatgaaggtagaagtgtattatctggtgttgttattgatttggacaaagaaggtaaaacaaagcacatcgaacgtatattgataaatgatgaccatccattttcaacattttaaaattacgtaagtaaacattcgaattggaccctatcgtccattagtatgaatttaatatagtaccactgtttacatagtaaatcggtggttctttttgttatcatttaatatgaaatatatccataggaggcatataactatgaaaccacaattatcgtggaaagttggcggtcaacaaggcgaaggtattgaatcaactggggaaatcttcgctacggctatgaatagaaaaggatattatttatatggatatagacatttttcaagtcgtatcaaaggtggacatacgaataataaaattagagtttctacgacgcctgttcatgcaattagtgatgatttagatattttgattgcatttgaccaagaaacaattgatgttaaccatcatgaaatgagagaagatagtatcattttagctgatgccaaggctaaacctgtgaaaccagaaggatgtcatgcacagcttattgaattaccttttacagcaaccgctaaagaattaggtacagcattaatgaaaaacatggttgcaataggtgctactagcgcattgatgaatttgaatacaaatacatttgaagaacttattactaatatgttttcaaaaaaaggtgacaaggtagttgaagtcaatatccaagcattaaacgaaggttatcgattaatgcaatcccgcttacctgaaatcgacggggactttgaattagagtcaacagatgcactaccacatctatatatgattggtaacgatgccattggattaggtgcaattgctgcaggttcacaatttatggcggcatatcctattacacctgcgtctgaagttatggaatatatgattgccaatatatctaaagtaaacggagcggttattcaaacagaagatgaaattgctgctgtaactatggctattggtgcaaattatggtggagtcagagcgtttacggctagtgctggtccaggtttatctttaatgatggaagcaattggattatctggtatgactgaaacgccattagtcattattaatacccaacgaggtggaccttctactggattacctacgaaacaagaacagtcagatttaatgcaaatgatttatggtacgcatggtgatattccaaaaattgttgtagcaccaactgatgcagaagatgcattttatttaactatggaagcctttaatttagcagaacaatatcaatgccctgttatagttttaagtgatttgcaattatctttaggtaaacaaactgttgaaaaattagattataatcgcattgaaattaaacgtggtgaaatcattcaatctgatattgaacgtgaagaagatgataaaggttatttcaagcgttatgcgttaacatccaatggtgtttctcctagacctatccccggtgttaaaggaggtattcatcatataactggcgtggaacacaatgaagaaggtaaacctagtgaatctgcgtcaaatagacaacaacaaatggaaaaacgaatgcgtaaaattgagcagttagtaattgaatcgccagtagaagctaacttacaacatgaggatgcagatattctttatatcggttttatttctacaaaaggtgcaattcaagaaggtagtaaccgtttgaatcaacaaggcataaaagttaacactatacaaattagacaattgcatccattcccaacaagcgttattcaagatgcagttaataaagcgaagaaagtcgttgtagtggaacacaattatcaaggacaattggctagtattataaaaatgaatgtcaatattcatgataagattgaaaattatacaaagtatgatgggacacctttcctaccacatgaaatcgaagaaaaaggtaaaataattgctactgaaataaaggagatggtatagatggcgacatttaaagattttagaaataatgttaagcctaactggtgccctggatgtggcgatttctcagtacaagctgcaattcaaaaagcagccgcaaatatagggttagaacctgaaggagtagctatcatcaccggtataggatgttctggccgtctttcaggatatattaattcttatggcgttcattctattcacggacgtgcattacctttagctcaaggtgtaaaaatggcgaataaagatttaactgttattgcatctggaggagatggtgatggttatgctataggtatgggacatacaatccatgctttaagaagaaatatgaacatgacgtatatagtcatggataatcaaatttatggtttgacaaagggacaaacatcgccgtcatcagcagtaggatttgttactaaaacaacgccaaaaggtaatatagaaaaaaatgttgcgcctttagaattagcattatcatctggtgccacatttgtagcccaaggtttttcaagtgatattaaaggattaacaaaactaattgaagatgcaattaatcatgatggattttcattcgttaatgtcttttcaccatgtgtgacttataataaaattaacacatacgattggtttaaagaacatttaacaagtgttgatgacattgaaaattatgattctacagataaacaattagcgactaaaactattattgaacatgaatctttagtaactggtattgtttatcaagataaagaaacaccatcatatgaatctcaaattaaagaattagatgatacaccacttgctaaaagagatatcaaaattactgaagacacgttcaatgcattaactgaacaatttatttaataattaaaactgagtcgtataaatgtatttataacagatccatttatgctactcagtttttttactattacaaaaaataaaggagtttttaaaaatgaaagacacattaatgagtatacaaataattcctaaaacaccaaacaatgacaatgttataccttacgtagacgaggcgattaaaataattgacgaatctggtttgcattttagagtaggtccgttagaaacgacagtacaaggaaatatgaatgaatgtttaattttaatacaatcattaaatgaacgaatggtggaacttgaatgtccaagtattattagccaagttaagttttatcatgtgccagatggcatcactattgaaactttaactgaaaaatatgatgaataacattaaaagtgaagtaaactggatttgaattggcttgttagagatgacgtataactttaactgcttttgcactttatagttaaatttaatataattattaaatgatacgggcaaatagaaaggattttgtaaagtgaacgaagaacaaagaaaagcaagttctgtagatgttttagctgagagagataagaaagcagaaaaagattatagtaaatattttgaacatgtttatcaaccgcctaatttaaaagaagcgaaaaaaagaggtaaacaagaagttcgttataatagagatttccaaattgatgaaaaatatcgcggtatggggaacgagcgtacatttttaattaaaacatatggatgtcaaatgaatgcacatgacactgaggtcattgctggtatacttgaagcattaggctatcaagcaacgactgatattaacactgcagatgttattttaattaatacatgtgcgattagagaaaatgccgagaacaaagtgtttagtgaaataggtaatttgaagcatttgaagaaagaacgacctgatattttaatcggagtttgtggttgtatgtcacaagaagagtcagtagtgaataaaattttaaaatcgtatcaaaatgtagatatgatatttggtacacataatattcatcatttaccagaaattttagaagaagcatacttatctaaagcaatggttgttgaagtatggtctaaagaaggagacgttattgaaaatcttccaaaagtccgtgaaggcaacattaaagcatgggtcaatattatgtatggttgtgataagttttgtacatattgtattgttccatttacaagaggtaaagaacgaagccgtagacctgaagacattatagatgaagtacgtgaacttgctcgtgaaggttacaaagaaataacgcttttaggtcaaaatgtaaattcatacggtaaagatttacaggatatagaatatgacttaggagatcttttacaagcaatttctaaaatagcgattccaagagttcgtttcacaacaagtcatccttgggacttcacagatcacatgattgatgttatttcagagggcggtaatatcgttcctcatatccacttgccagttcaatctggaaataatgcagtattaaaaataatgggtagaaaatatacacgagaaagttatttggatttagtaaaacgaatcaaagatagaattccaaatgtagcattaactacagatattattgtaggttatccaaatgaatcagaggaacaatttgaagaaactttaactttatatgatgaagttggttttgaacatgcatatacgtatttgtattcacaacgtgatggtacgcctgctgctaaaatgaaagataatgtacctttagatgtcaaaaaggaacgattgcaacgtttgaataaaaaagttggtcattattcacaaatagctatgagtaagtacgaaggacaaactgtaacagtactttgtgaaggtagtagtaaaaaagatgatcaggttcttgctggctacaccgataaaaataagttagttaattttaaagcgcctaaagaaatgattggtaaactagtggaagtacgaatagatgaagctaaacagtattcattaaatggcagttttgtaaagcaagtagagccggaaatggtgattcaataaatgtataataaagatgacgtgttgaaacaagcggataatattgcaaataaaattaaaaatttggatactatcaaaacatatcaacaaattgaagcacagattcatcagaaccaaacgataaagactaaaatggatatgttaaaaaagcatcaaaaacaagcagtaaactttcaaaattacgggaaacaaaatgcgctagaacagtcggaacataccattcaaagtatagaagcagaaataaatacattgcccatagttgaacagtttcaaacttcacaatatgaagcgaatcaattattgaaaatgtttgtatcaacaatggaaacacgtttaaatgaccataataaagccaaacatagtgattaattacaaacaaaaaggagaacaatcatatgaaatcaagaaaactggctataactgcacttttaattgcaataaatgttgtattaagcagtattatcatcattcctctaggaccagttaaggcagcaccagtacagcattttgtaaatgtattaagtgcggtcatagtaggtccttggtatggattagctcaagcgcttatatcatcaattttaagagttctttttggaactggtacagcttttgcatttccgggtagtatgattggagttttattggctagtatgttttacatatatcgtaaacatatattcatggccgcggtcggtgaagtacttggaactggtgtcatcggaagtttaatttgtataccattagcatatttccttgggcttcaagacttcttcattaaaccgttaatgattacgttcatagtctcaagtgctatcggatctattataagttatttcttattaattactctaaaaaaacgtggtattcttaaaaggtttataaaataattttatgatatatgatttcaaacaaagtcattgttcattttaatattgaacgcccttacttaattaaatgtcttgaatgttagaattttaatataattctaaacatgctattaacacattttattaggtttgaggcgttttcttatacatttaagatgcttcgttattatatggtatgaataggtttgtaaaagtaagtatgttaaaatgtataagttaaataattaataattagaaagcttacaaacgaatatattgtaaagacaaattttaaaaagagacaagggttgtgaagaaataatatgtctaatgttacaccaatgatgcagcaatatttaaaaataaaatcagaataccaagattgcttattattttttagactaggtgatttctatgaaatgttttatgaagatgccaaggaggcatcacgtgtacttgaaattactttaactaaaagagatgctaaaaaagaaaatccaattccgatgtgtggtgttccgtatcattctgcagatagttatatagatacacttgttaataatggatataaggtagctatttgtgaacagatggaagatccgaaacaaacgaaaggtatggttagacgtgaggtagtaagaattgtgactccaggaactgtgatggagcaaggtggtgtagatgataaacaaaataactatattttaagttttgttatgaatcaacctgaaattgcgcttagttactgtgatgtttctactggtgaattaaaggttacacattttaatgatgaagcgactttattaaatgaaattacgacgataaaccctaacgaagttgttatcaatgacaatatttccgatcatttaaaaagacaaattaatatggtgacagaaacaataacagtcagggaaacgttatcatctgaaatctatagtgtgaatcaaactgaacataaattaatgtatcaagcgacacaattattgctagattatattcatcatacacaaaaacgtgatttatcgcatatcgaggatgttgttcaatatgcagctatagattatatgaaaatggatttttatgctaagagaaaccttgagttaacggaaagcattcgattaaaatccaaaaaaggaacgctactttggctgatggacgaaacgaaaacaccaatgggagcacgtcgattaaaacaatggatagatagaccactaataagtaaagaacaaattgaagcacgattagatatcgttgatgaatttagtgctcatttcatagaaagagacaccttaagaacatatcttaatcaagtgtatgatattgaacgtcttgttgggcgtgttagttacggaaatgttaatgcgagagatttaattcaacttaaacattccatttctgaaataccgaacattaaagcattactaaattctatgaatcaggatactcttgtacaagttaatcaactagaaccacttgatgatttacttgatatattagaacagagtttagtagaagaaccaccaatttcagttaaagatggtggactattcaaagttggttttaatatgcaattagatgaatatcttgaagcttcaaaaaacggaaaaacatggttagcagaactacaagccaaagaaagacaacgtacaggaataaaatcattgaaaataagctttaataaagtgtttggttattttatagaaataacacgtgccaacttgcaaaattttgaaccaagtgaatttggttatatgaggaagcaaacgttatcgaatgcggaacgatttataactgatgaacttaaagaaaaagaagatatcattttaggtgcggaagacaaagccattgaattagagtatcaattatttgttcagctacgtgaagaagttaaaaaatatactgaacgtttacaacaacaagctaaaattatttcagagttagattgtttacagagctttgcagaaattgctcaaaaatataattatactaggccttcatttagtgaaaataaaacattagaattagtggaatctaggcacccagtagtggaaagagtaatggattataatgactatgtgcctaataattgtcgattagataatgaaacatttatatatttaattacaggtccgaatatgtctggtaaatcgacgtatatgagacaagttgccataattagtataatggcccaaatgggagcttatgtcccttgtaaagaggctgtgttacctatatttgatcaaatattcactagaataggtgcggcagatgatttggtttcaggtaagagtacgtttatggtagaaatgctagaagcacaaaaggcattaacttatgcaacagaggatagtttgattattttcgatgaaattggacgtggtacttcaacgtatgacggtttagctttagcgcaggcaatgatagagtatgtagctgaaacatcacatgctaaaacgttattttcaacacattatcatgaattgacaacattagatcaagcattaccaagtctaaaaaatgttcacgtcgctgctaatgaatataaaggtgaacttatattcttgcataaagtcaaagatggtgcagttgacgatagttatggtattcaagttgcgaaattagctgatttacctgaaaaagttattagcagagcacaagtgatcctaagcgagtttgaagcgtctgctgataaaaaatcatcgatatcaaatttaaaaatgatcgaaaatgaacctgaaattaatcaagaaaattcaaacttaagtgttgaagaaacaactgatactttatctcaaaaagactttgaacaagcatcatttgatttgtttgaaaatgatcaagaaagcgagattgaactacaaattaaaaatttgaatttatctaatatgacaccaattgaggcattggtgaagttaagtgaattacaaaatcaattaaaatagaggtgttgcaaaatggggaaaattaaagaactccaaacctcattagcaaataaaatcgcagcaggtgaagtagttgaaagaccgagttctgttgtgaaagaactgttggaaaatgctatagatgcaggcgctacagaaataagcattgaagtagaggaatctggcgtccaatctattcgcgtagtcgataatggaagcggaattgaagcggaagacttaggattagtatttcatagacatgcgactagtaaattagatcaagacgaagatttatttcatattaggacattaggattccgtggtgaagcactagccagtatttcatcagttgctaaagtaacattgaagacttgcacggataatgctaatggaaatgaaatatatgtagaaaatggtgaaatattaaatcataagcctgcaaaagcgaaaaaaggaacagatatacttgtagaatcattgttttataatacaccagcacgtttaaaatatattaaaagtttatacactgaactaggtaaaataacagatattgtcaacagaatggcaatgagtcatccggacattcgaatagcactcatttcagatggcaaaacaatgttaagtacaaatggttcaggacgaactaatgaagtgatggcagagatttatgggatgaaagttgcacgagatttagtacatatatctggagatacaagtgattatcacattgaaggttttgttgcaaagcctgaacattctagaagtaataagcactatatttctatttttattaatggacgatacattaaaaactttatattaaataaagcgattttagaaggctatcatacactcttaacaataggtaggttcccgatttgttatattaatattgaaatggatccaatcttagtagacgtaaatgttcatccaacaaaactagaagtgcgtttatcaaaagaagagcaactatatcaattgatagtgagcaaaatacaagaagcatttaaagaccgtatattaattcctaaaaataacttggattatgtgccaaaaaaaaataaagtgttacattcattcgaacaacaaaaaatcgaatttgaacaaagacaaaacacagagaataaccaagagaagacgttttcatctgaagaaagtaacagtaagccatttatggcagaaaatcaaaacgatgagatagttataagagaagattcatataatccattcgtaacgaaaacgtctgaaagtttaatagctgatgatgaatcttccggttataataatacacgtgaaaaagatgaagactacttcaaaaaacaacaagaaattttacaagaaatggatcaaacatttgattcaaatgacgatacatctgtgcaaaattatgagaataaagcgtctgatgattattatgatgtgaacgatattaaaggaacaaaaagtaaagacccaaaacgaagaattccatatatggaaattgttggccaagtacatggaacgtatattattgctcaaaatgaatttggcatgtacatgattgaccagcatgcagctcaagaaagaataaaatatgaatattttcgagataaaataggtgaagttaccaatgaagtacaagatttattaatcccgttaacatttcatttttcaaaagatgaacaattagtcattgatcaatataaaaatgagcttcaacaagtaggtatcatgttagaacattttggtggtcatgattatattgtaagtagctatccagtttggttccctaaagatgaagtagaagaaattattaaagatatgattgagctaattttggaagagaaaaaagtagatatcaaaaaattacgtgaagatgtagcaatcatgatgtcatgtaaaaaatctattaaagcgaatcattatttacaaaaacatgaaatgtctgatttaattgatcaattaagagaagcggaagatccatttacatgtccacatggtcgtccaattatcattaatttttcaaaatacgaattagaaaaattatttaagcgtgtgatgtagagaggatgaatcaattgaataacaacatattgcctgccataagaaacattaaagatttagagaaactgattaaaacagattataaaatgtgtgtgcttctagatatgcatataggacatattaaaagtataatggaattgctgaagcaaaatcatatagagtgttttattcatatagatttgataaaaggtttaagccacgatgaatttgcaagtgaatttattattcagcaatacaagccaaaaggtattgtatcgactaaatctaaagtaataaaaaaagcgaaatcattaaatactttaacgatttttagagtatttattattgatagtcaagcattgaaacgcagtatagatttgataaaaaaagttgaacctgattttgttgaagtacttccaggtgttgcgagtaaagcgattcatcatattcagaaagaaacaaacacacaagtcattgcaggtggcctaattaacacaatagatgaagttaatgaagctgttaaaaatggagcgaaatatgtaacaactagttatgataaactctggtgaatcataagtctgcaaaaattagatttttcactagatttagtcatataacatattaaaaaagccgttttcatatgggatatgtaataaggaatttaaggtatcatacaaagaataattaaataaaataattagcacctctaaaacgattaaaatcattaaagttatagaggtgtttattatgaaaagaaaaccatacgctatgcgtatggttcagaaaaggttctaccattgtcacaaaaaatgcatctctacgtgctagaataaatattggtcagccaaccaaaataatcaacacgaggagatgctatttaatgtcatctgacacaaacagtttagcacatacaaaatggaattgtaagtatcatattgtctttgcacctaaatacagaagacaagtgatatatggaaaaataaaaaaagatatagggattatattgcgtcaattatgtgaaagaaaaggtgtagagataattgaagcagaggcatgtaaagatcatatccatatgttagtaagtataccacctaaacttggggtatcatcatttgttggctatttaaaaggaaaaagtagtttaatgatatttgatagacatgctaacttaaagtatagatatggaaatagaaagttttggtgtaaaggattttatgtggatacagtaggtagaaataaaaaagtgattgaaaattatattcgtaatcaattacaagaggatatcgttgcagaccaaatctcaatggaagaatatttagatcctttcactggagagaaaaatagaaaaagaaagaaaaaagagtaaccctttagggttgctgaaatagtagtgcagttggctgacttgtcagtacccttttagggctggccagtaaggaaggcttatagccgcagaacaaaccacccgttcacacgggtggttttgatttgtaaaaaatgcaactagtcataaaaaatatggctgaagaatgtcatttaagcaactgaacgacatagactatttagtgcggattgatatttctagttttcaaattaaactacttttataaagacttgaaaaattaaatttgacaaaatttttacaaaaaccattgacaacgctttcatctcgatagtatcataacaaatataataaaagttaatacatagaatagagacgggagatttctacgagccaaactgctagtgtaggaatctctttgtctttttgggaggacatttaatatgaatgtatatttagcagaattcctaggaactgcaatcttaatcctttttggtggtggcgtttgtgccaatgtcaatttaaagagaagtgctgcgaatggtgctgattggattgtcatcacagctggatggggattagcggttacaatgggtgtgtatgctgtcggtcaattctcaggtgcacatttaaacccagcggtgtctttagctcttgcattagacggaagttttgattggtcattagttcctggttatattgttgctcaaatgttaggtgcaattgtcggagcaacgattgtatggttaatgtacttgccacattggaaagcgacagaagaagctggcgcgaaattaggtgttttctctacagcaccggctattaagaattactttgccaactttttaagtgagattatcggaacaatggcattaactttaggtattttatttatcggtgtaaacaaaattgccgatggtttaaatcctttaattgtcggagcattaattgttgcaatcggattaagtttaggcggtgctactggttatgcaatcaacccagcacgtgatttaggtccgagaattgcacatgcgattttaccaatagctggtaaaggtggttccaattggtcatatgcaatcgttcctatcttaggaccaattgccggtggtttattaggtgcggtagtatacgctgtattttataaacatacatttaatattggttgtgcaattgcaattgttgtagttattattactttgattttaggttacattttaaataaatcatcaaaaaaaggtgatatcgaatcaatttactaaaataaaaagaaacgtaaatagcataatttaacatgtttgattcatggattatgctattttttcgccaaaatttaacagattttgtacaatgggttagcgattatttttttaataaaggagatactactaatggaaaaatatattttatctatagaccaaggaacaacaagctcaagagcgattttattcaatcaaaaaggggaaattgcaggggtagcacaacgtgagtttaagcaatattttccacaatcaggttgggttgaacatgatgcaaatgaaatttggacatctgtgttagctgtaatgacggaagtaattaatgaaaatgatgttagagctgatcaaattgcaggtatcggtattacaaaccaacgcgaaacaacggttgtttgggacaaacatactggccgcccaatttatcacgcaattgtttggcaatcacgtcaaacacaatcaatttgttcagaattaaaacaacaaggatatgaacaaacatttagagataagacaggattgcttttagatccgtattttgcaggtacaaaagttaaatggattctagacaatgttgaaggtgcacgagaaaaagcagaaaatggcgatctattatttggaacgattgatacttggttagtatggaaattatcaggaaaagctgcgcatattactgattattcaaatgcgagtcgtactttaatgtttaatatccatgatttagaatgggacgatgagttattagaactacttacagtacctaaaaatatgttgccagaagttaaaccttcaagtgaagtatatggtaagacaattgattaccacttctatggtcaagaagtaccaatcgctggtgtagctggtgatcaacaagcagcattatttggacaagcttgcttcgaacgtggtgacgtgaaaaacacatatggaactggtggcttcatgttaatgaatacaggtgacaaagcggttaaatctgaaagtggtttattaacaacaattgcttatggtattgatggaaaagtaaattatgcgcttgaaggctcaatctttgtttcgggttcagcaatccaatggttacgtgatggattaagaatgattaattcagcaccacaatcagaaagttatgcgacacgagttgactctactgagggtgtttatgttgttccagcttttgtaggtttaggaacaccatattgggattctgaagcacgtggtgcgattttcggtttaacacgcggaactgaaaaagagcactttatccgtgcaacattagaatcattatgttaccaaactcgtgacgttatggaagcaatgtcaaaagactctggtatcgatgtccaaagtttacgtgtcgatggtggtgcagttaagaataactttattatgcagttccaagcagacattgttaatacttctgttgaaagacctgaaattcaagaaactacagctttaggtgctgcatatttagcaggtttagcagttggattctgggagagtaaagatgatatcgctaaaaactggaaattagaagaaaaattcgatccgaaaatggatgaaggcgaaagagaaaaattatatagaggttggaaaaaagctgttgaagcaacacaagtttttaaaacagaataaacttgtagattagacttttgtataaacattgtgatacaatcaatttaagttaatatttgaatcgagaaacgagagatttgttcgaacatgtacaattgaaggattgtttatgtgggacaagtctctcgtttttacattttttaggaggcgttttggaatggcattgtctacttttaagagagaatatattaaaaagaatttaagaaatgatgaatatgatttagtaattattggtggcggtattacaggtgcaggtattgcactagacgcgagtgaaagaggaatgaaagttgcattaattgaaatgcaagactttgcacaaggaacaagctcaagatctacaaaattagtccatggtggtttacgttacttaaaacaattccaaattggagtagttgccgaaactggtaaagaacgtgcgattgtttatgaaaatgggcctcatgttacgactccagagtggatgcttttaccaatgcataaaggtggaacatttggtaaattctcaacatcaattggtttaggaatgtatgatcgtttagcaggtgttaaaaagtctgaacgtaaaaaaatgttatctaaaaaagaaactttagctaaagaaccattagttaaaaaagaaggtctaaaaggcggcggttactatgttgaatatcgtactgacgatgcgcgtttaactattgaagttatgaagcgtgctgctgaaaaaggcgcagaaattatcaactatactaagtcagaacacttcacttatgataaaaatcaacaagtaaatggtgttaaagttatagataaattaactaatgaaaattatacaattaaggctaaaaaagtggttaatgcagcaggtccatgggttgatgatgttagaagtggtgattatgcacgcaataataaaaaattacgtttaactaaaggtgtacatgttgttattgatcaatcaaaattcccattaggtcaagcagtatactttgatactgaaaaagatggaagaatgatttttgcaatcccgcgtgaaggaaaagcgtatgtaggtactacagatacattctatgacaatatcaaatcttcaccattaactacacaagaagacagagactatttaatcgatgcgattaattacatgttccctagtgttaatgttacagatgaagatattgaatcaacatgggcaggaattagaccattaatttacgaagaaggcaaagacccttctgaaatctctcgtaaggatgaaatttgggaaggtaaatcaggtttattaactattgcaggtggtaaattaacaggctatcgtcacatggctcaagacattgttgatttagtatctaaacgcttgaaaaaagactacggtttaacatttagtccatgtaatacaaaaggtctggcaatttcaggtggcgatgtaggtggtagtaagaactttgatgcgtttgtagagcaaaaagtagatgtagctaaaggattcggcattgatgaagatgttgcaagacgtttagcatctaaatatggttcaaatgttgatgaattgttcaacattgcgcaaacatctcaataccatgatagcaagttaccattagaaatttatgtagaacttgtttatagtattcaacaagaaatggtatacaaacctaacgatttcttagttcgtcgttctggtaaaatgtacttcaatattaaagatgtattagattataaagatagtatcatcgatattatggctgatatgttagactactctccagctcaaattgaggcttatactgaagaagttgagcaagcaattaaagaagcgcaacatggaaataatcaaccagcagttaaagaataattaatttgtacaatcataaactggtgtcctgttttaagggcatcagttttttatatgagatacattagtcaattgaaactaggcatcactaaatgtatgataataataaaagcgaatataaaaacgttgttattaaaggtgtgagatgatgactgaaaaacaatttaaattaactgtacaagataatacgaatattgaagttaaagtgaattttacagatgtagattcaaaaggaattattcatatatttcatggtatggctgaacatatggaacgttacgataaattagcacatgcactttcaaagcatggcttcgatgtgatacgtcataatcatcgaggacatggtattaatattgatgaatcaacaagagggcattacgatgatatgaaacgagttatcggtgatgcctttgaagtagcgcaaacagtgagaggcaatgttgataaaccttacattataatcggacattcaatggggtctgttatagctagattgtttgtagaaacatatccgcaatatgttgatggtctaattttaagtggtactggtatgtatccgttatggaaagggttaccaaccgttaaggtgttacaactgattgcaaaaatttatggtgctgagaaacgggttgaatgggttaaccagttagtatcaaatagttttaataaaaaaatacgtccattacgtacacaaagtgattggatttctagtaatccaactgaagtagacaactttattaaagatccatatagtggatttaatgtgtcaaatcaattattatatcaaacagcctattatatgctacatacatcacaattaaaaaatataaaaatgttaaatcatgccatgccaatattattagtttcaggatatgacgatcctttaggtgattatggtaaagggattttaaaattggcgaatatatatagaaaagccggcattaaaaatgttaaagttaatctttatcatcataaacgtcatgaagtgttatttgaaaaagatcatgacaaaatttgggaagacttgtttaaatggttggatcaattttataaaaaataaagaaagtggaattaaatatgaataaaaataagccttttattgtagtaattgtggggccgactgcatcaggtaaaacagagctgagcatcgaactcgcgaagcgtatcaatggtgaaatcataagcggtgactctatgcaagtctacaagcatatgaatattggaactgcaaaagtaacacctgaagaaatggatggtattccacatcatttaattgatatcttgaatcctgatgatacattttcagcatatgaattcaagcgattagcagaagatttaattactgatataacgaatagaggtaaagttccaatcatagcaggtggaacaggcttatacattcaatcattaatatataattatgaattagaagatgaaacagttacacctgcacaattatccgtagttaaacaaaagttatctgcattagaacatttagataatcagcaactacacgaatatttagctcaatttgacgaggtttctgccaaaaatattcaccctaataaccgtcaaagagtgttgcgcgctattgaatattatttaaaaacaaaaaaacttttgagtaatcgtaagaaagtgcaacaatttactgaaaattatgatacattattaatagggattgaaatgtcgcgtaaaacattatattcaagaataaataaacgtgttgatattatgttggatcacggattatttagagaagtgcaacaacttgttgaacaaggctatgaatcttgccaaagtatgcaagctattggatataaagaattaatacctgtgattaacggacaaatgatttatgaagatgctgtcaatgatttaaagcaacattcacgccaatatgcaaaacgacaaatgacatggttcaagaataaaatgagtgttcattggttagataaagaaaatatgtcacttcaaatgatgttagatgagattacaacccagattaagtaaaaggagtccgacagatgattgcaaacgaaaacatccaagacaaagcactagagaattttaaagcaaaccaaactgaagtaactgtattctttctaaacggtttccaaatgaaaggtgttattgaagaatacgacaagtatgtcgtaagcttaaattctcaaggcaaacaacacttgatttacaaacatgcgatcagcacttatacagtagaaactgaaggtcaagaatctactgaaagtgaagaataagttgtaatcatatgggcacgatttaatgactcgtgtacataacgtttgaagtatgataaatagatatagaaataaagtcatatgtgacatcaattaaatgatgttcaaatgacaagatacaatagaggaatgtttgtaataaaaacgcttcatataaaggccgagtcaatatatgatacgactttatatgaagcgttttatttgctatgagctagtatattttataataacttttctatttctctttcgatttgaacaggctttttttgaggtgcaaatcgtttaacaacgttgccttcacgatccactaaaaacttagtgaaattccatttgattttctcattaaagaatccgtgttgtgccgcagtcaaatatctaaataatggtaattgatgttccccttttacgtctattttttgatgcatagggaaggtaacaccatagtttaatttacagttttgagctgcttcttcgcctgatccaggttcttggccaccaaattgattacaagggaaacctagaattacaaacccttgatttttgtatttctcgtataatgattgcaaaccttcaaattgtgaagtaaagccacattcgctagctgtattgacaattagcataacgtcacccttatatgcatctaatttgtaagtaacacctttatttgtttctactacaaaatcataaattgtctccattgaatcatcctttcgatttacttaaaatgtaccataaaatcgtgtaatagtctttactaaaactctatgatagaatactttgagtaggattttattaaggagatgtataacatggctcagcaaaaaattcatgatactaaaaataaactagaaaaagctgtattagtcggtgtacatgctcaagatgataagcaatttaattttgagtctacaatggaggaattatcatctttatcagagacttgccaacttgaagtgttgggtcaaattactcaaaacagagatcgtgtagatcgcaaatattatgttggtaaaggtaaaattgaagaaattcaagcatttattgagttcaaagatattgatgtagtcatcacaaatgatgaattaacgactgcacaatccaaatcactaaatgaagcgttaggtgtaaaaattattgatagaactcagttgattcttgaaatatttgcattaagagcaagaagtaaagaaggtaaattgcaagtagagctagcacaacttgattatttattacctagattgcaaggccatggtaaaagcctttctcgtttaggtggcggtattggaactagaggccctggtgaaacgaagttagagatggatcgcagacatattcgaactcgtatgaatgaaattaaacatcaattgcggacggtagaagaacatcgcgaaagatatcgaaataaaagaaatcaaaatcaggtgtttcaagtagctttagttggttatacaaatgctggtaaatcatcatggtttaatgttttagcaaatgaagagacgtatgaaaaaaatcaattatttgcaacgttagatcctaaaacacgacaaattcaaataaatgatggatttaatttaattatttcagatactgttggttttatacagaaactacctacgacgttaattgcagcttttaaatcaactttagaagaggctaaaggtgcagatttattagtacatgtcgtagatagtagccatcctgaataccgtacgcagtatgacacagttaatgatttaatcaaacaattagatatgagtcatatttcccaaatagttatttttaataaaaaggacttatgtgatcatgcatcaaatcgtccagcaagtgatttgcctaatgtttttgtttcttctaaaaatgatggtgataaattacttgttaagacgttatttattgatgaaatcaaaaggcaattaacttattatgatgaggcaattgcgacgaataatgcagatcgattatattttctaaaacaacatactttagtgactgaacttaaatatgatgaaattgaaaatgtttatcgtataaaaggatttaaaaaataataaaaggacgaaattcaaatgaaagatataagtaagatagtagctgacgtcgaatcaacattagcaccatattttaaagaaattgaagaaactgcatatattaatcaagaaaaagtattaaatgcgtttcatcatgtcaaagcaaccgaaagtgatctacaaggatcaacaggatacgggtatgatgattttggacgtgatcatttagaagaaatatatgcgcaggcatttaaagcagaagatgcaattgttcgtccgcaaattatttcaggtacgcatgcgattactattgcattacaaagtttattaaaacattgtgatgaattaatttatataacgggaagtccatatgacactttacttgaagtcattggtgtaaacggaaatggtattgaaagtttaatggagcacggcgtatcgtataaagatattgcacttaaagaaggtaagatcgatattgaaagtgtgttagatggggtttccgagcgcaccaaagtaatagcgattcaacgttcgaaaggctatgatcaaagaccttcaattcctctagatgaaattgaagaggtgattactaggttgaaagaagttcatcctaatattttaatatttgtggataactgttatggggaatttgttgaaagacgtgaacctatagaatgtggtgccgatttaatagcaggatcattaattaaaaaccctggcggtggtttagctaagattggtggatacattgctggtagaaaagatttaattgaacgatgtggttatagattgacagcacctggtattggtaaagaagcgggtgcttcattaaatgcattgcttgaaatgtatcaaggtttctttttagcaccacacgttgtcagtcagagtcataaaggggcattgtttactagtttatttttagaaaaaatgaatatgaacacaacgccgaagtactatgaaaaacgaactgatttaattcaaacagttaaatttaaaacgaaagaacaaatgatttcattttgtcaaagtattcaacacgcatccccaattaatgcacattttagtccagaaccgagttatatgcctggttacgaagatgatgttattatggcagctggtacgtttattcaaggttcatcgattgaattatctgcagatggacctattcgtcctccttatgaagcatatgttcaaggaggattaacatatgaacacgttaaaattgctgtgacaagagctgttaagcagttgaaagaacaaggacttatagaatagattaaatttcaccctaaatgataaagtgttttgggtgaaattttttttgcgaagatttatcagattatttttaaaaattgaaaaaatattttagctgtaggtcgttttatagcgttttagaggtcggaattgcagttatatcaatgttttgacctttatgttagaaaacctgacatatttttgaaatcctaaaaaaattatgataagttattaacaagttcaaaagtagaggagaggaacaatgatatcgaatgatgcaatcagacgaaatatggctgtcttctctatgagtgtagtaagtaagttaacggatttaacgccaaggcaaatacgttactatgaaacacatgaactcatcaaacctgaaagaacagaaggtcaaaaacgtctgttctcactcaatgatttggaaagattactagaaattaaatcattattagaaaaaggatttaatatcaaagggattaaacaaatcatttatgactcacaagagcatttaacaacagatgaacaagagataagaaaaaagatgattgtagatgccacgcaaaagcctattggagaaactttgccaataaatcgtggtgatttatcccgatttattaaataaaatttggaggattttaaaatgccaaaacgtactttcactaaagacgacattcgtaaatttgcagaagaggaaaatgtaagatatttaagattacaattcactgatattttaggaacaattaaaaatgttgaagtgcctgtaagccaattagaaaaagtacttgataacgaaatgatgtttgacggttcttctatcgaaggtttcgtacgtatcgaagaatcagatatgtacttacatccagatttagatacttgggtaatcttcccatggactgctggacaaggtaaagttgcacgtttaatttgtgatgtatataaaacagatggtacaccatttgaaggggaccctcgtgcaaacttaaaacgtgtattaaaagaaatggaagatttaggcttcacagactttaacctagggcctgaaccagaattcttcttgtttaagttggatgaaaaaggggaaccaactttagaacttaatgatgatggtggatatttcgatttggcacctacagatttaggtgaaaactgtcgtcgtgatattgttttagaattagaggatatgggcttcgatattgaagctagtcaccatgaagttgcacctggtcaacatgaaattgactttaaatatgcagatgctgttacagcatgtgataacatccaaacatttaaattggttgttaaaacaatcgcacgtaaacataatttacacgcaacatttatgcctaaaccattatttggtgtgaatggtagcggtatgcactttaacgtttcattattcaaaggtaaagaaaatgcattcttcgatccaaatactgaaatgggcttaacggaaactgcatatcaatttacagcaggtgtacttaaaaatgcacgcggatttactgctgtatgtaacccgttagtaaactcatataaacgtttagtacctggttatgaagcaccatgttatattgcatggagtggtaaaaaccgttcaccgttaatccgtgtaccatcttcaagaggattatcaactcgtatcgaagtacgttcagtagatccagctgcaaacccatacatggcgttagctgcaatcttagaagctggactagatggtattaaaaataaattaaaagttccagaaccagttaaccaaaatatttacgaaatgaatcgtgaagaacgtgaagcagtaggcattcaagacttaccttcaacactttacactgcaataaaagcaatgcgtgaaaatgaagttattaaaaaagcattaggaaatcatatctataatcaatttattaattcaaaatcaattgaatgggattactacagaactcaagtatctgaatgggaaagagatcagtacatgaagcaatattaatacgctaaacaatgatgggaaatcagtaatatcaagggctagagcgttttgctttagctcttttttgatttaactgggcaactttttaaggtgtaaaatgtgtctttcgttacgattgggcaacttttggtcaagtaaatgttttgtgtatttatttttttaaagctggggaagaccattttatattttagttcacatgaattttaatatatttggaggtgatgagatgaggcgataaaagaacgtcgcgaaaacgttgagtattacttgaaaatagccacattcatattacttctcatcgaattcatttgcagaacgttctaaggtaagaccccgaaaagaggggccttactactcattattaagggggtaatactatatgaaaagagaaacaaaacaaaaaatatctttttgtttatcaatcggtatattcattttagttatactactattgatattctaaaaaattaaaaattttcgcctcatctattttatgaattgctatgatggaatattcaatacaatcaaaaagttgatagaaaacaaagagatatcgagttatcaaattaataaagatacagggataagttacggtaatattaatgctatgcgccgtggagaaagaagaattgaaaatttaagcttaaagaatgcaaagatcttatatgaatatgcgaaaaaggtattataatataagcattgagttcaataggcatacaataactgcccaaactagtgactgagtgggagtttttatagtattaaaagttttctaaaagcgaaagaaatcatgtttactgatttacttatgtttttagaaatagtataataattttatataatatatagaacttcagtataccttttgagtatatatggagttctttcttttttacaagatgtatatgtataaatggaaatgtttattacattacataaaaacctttaggtgctcttagatggatgttaatcataaaacaaagagattttgaaaaatataggctattataatttagaattacaaattattaatcttgtcattggatatgggaattcaaacatatcacttactccaatttgtggaatgttaaataactataaagaggaaaggagaaaaaatgataagaatggttaaagaaaaagaacgaatagcaaaattaaatttcgaatagctgtgacgagcttaataattcaagtacttaattttatcaaatcgttcttttaaaaaggcaaagggcaaaagacctttaccacattaaatagggaggtggtatttatgacaagagaattaaggaaaaaattaactctctaccttaacattgcaactttaatattatttattattaatttaactagaaaaaaataaactattctttcattttgacaaaaataatgaaccagtttaaagaaatttataatacaatagaaaaattactaaatgataaatcaatatctaattatagaattaatcaagacactggtgtttcttatggtggtataagtgaatcaagaagcgggaaaagaaaagtgaataatttaactttagaaacagcggaaaaactctataattaccaaaaacaattagaaataatgattgaagattaaaataaggccatatcttttgaaatatcatggagtgagccttttaaatcatataattttaaagtatattaaagatggatagcttaatgtgaatataaataaaaaattatcaaataatataatatagaatatatgaagacaagaaattttatcaatatataataaaaaaagccaatactattaggtattagtttttgaattaactagtttggcaactacaaagaaacaatgtattgctaaacgtagttactgcattaggattattataattataaatagaaagagagcgtgattaaaaatgaatgagattgaaactattataagtgaaatagaaaagttattaactaacaatacaccatatagtatttcaaaaaactcaggtgtaccacgtcaaacagttactgatttaaaggtaggtaatactaaaataaaggatgccaaatttaaaacaataatcaagttatacgagtatcaaaagtcgtcagaaaataattcagagtgctaataaatataccttgtttgattaggtggacaagaaattaaatttctaatgatttcatggttgtctgtccacgctttgtccacctcaataaaattatctctaggtttttaaaattgtacatgtttaaacaatcaaaagtatgcattattatattatcatttccataaaaatttaaatgatctttaagtgatgatataaaaggctgaacatagtaaataagttaactttaatgcagcatactatacatattttataataatgtttatgaacataatttttcattgacaattttttatattaaattgtgtaattggcatatatgatgatttgtgataattatattgtaatatagcatttggttttatgattctaaaattaatagatttgaaaagtatactttatttcatgaaagtttttggtacatttatttgaaaatgtttttattacaaagttacatggctaaatgtttcttaacaaaattaattcatcgagtgtaaagaatcgtgtggtaaacataatttatatagattataaggaggtgaaaatggtcgaggaagtaaaaacgataaaatagtttgaatgttttgatttcaattctgataggactattgaatttgcaaactaataagaatgtgaggtttgatttaatacgaagtcatattctttaaataaaatattactttctcaccattagtaaaatgaagatgactattaaagtgcgaaaaacaaataaaaaagagaaaatagaatttttaatagggatgtttataattattttagtaatattagggttcaaaattatgaaataaatgtatagtatttgagaagtctatttgactccgaaaaaattaaagtctaaagatatctcaatatctcaaatttaatagactactggagttagtagtttgaatattgaaagacactaatctaataaaaatacataaaaggttaaactttagaagtggttgtagacttcaatgaatactaaacgttgaagtttagtaaaagacgtaaggtatacaagacaaatcgtttgtctttgacaaagtaattgatgatgaaaagtcgttaatatgtagaaacaaaaattgaaaatatgaaatttaactattatgaagtgatgatagccattaatgaatagaaaaataataaaatcatttataaataaaaaatacgttgagttcacagaatttcgaaaaaaagtagtaaacattgtacagatatggagatgaaaaaaatgtcagaatacaagaaaaagataattgaattaattgaaagtaatttaacaggatatgaaatttctaaaaacactggagtttctcaatatgtactttcacaattaagacagggcaaacgcgaagtagataatctaaccctgaatacaacagaaaaattatatgaatatgccaataaagttttgtaatttaactactgtataaattaatcaagctatgtttatttgatttaactattaataaaaatcatatggtaaatggatattataataattaaaatacaaaaatagtagattcgaatttgtgaaaaaggagtatgtcgtttcatttagaatttattgcacgaaattagcatcgaataagggaaaataagtgttaagttttaaatgataaaaaagattggaatggattgtctcgaaatgctcccttcaaagttttcattttttcaatgtctacttcgaagggggcatttccattaaattgttatagctttttatatttgtataatgaacatataagtttaagaagatgcgagtgaaggaaataaaaaagctcaaatgtaccaaattgttaatcttaataaatctctactttataaagatggaatggacattcgagcgttaatcagtcaggagggaatttcactcctacaatttaataataatacttgcttcaccactgtacaaggagtgatttgttatgttcaaagtgaattattcgattttaagttattatccagaatataatatcgcagtaagttggcaacgtttaagagaaggaaaaataataaaaaacaagatttaatactgctgcgtcatgaggcgcttgaacattatttgatgaataagtataattacaactatgattatgcacataaaattgtatcaaaaaatacgattattcaatttttataaaaataaggtggattaaatgcttacattaataaaattgaaagaagatgaacaggttataatatatgaatatatacctgaagatgatataagtaacggtaaaggttcagtaacttttaataaaaaagatgcagaggttatagatttttcattatctgaaatagaaaatgaagaatattttatgttatatcgtaataagtctttttctgtagtaagagactttatcgagaagcaagaatttcccgaaaattataaaatagcttggtattaaagcatcctttctacacagataaagagaaagtggtgctatttttatacacttttttaactatttactgaaatagcagaatcacaaaagttaacatatttaaaagaacttggtgaagatggtgaatataaatatgttgccaaaatagatagtgaaacatctaaattatgtcattcactcaacggaaaaatatttaaagttaaagatatgataccaggtgtgaatgcgccacctatgcatccttggtgtagaagtaccgcagtgccatatgtcggcaaatggcgagacaagttctttaaagagcgtgaaggtaaatatcaggtagaagtaaaagaagcaaaattacaggaaaaagctaaaaaccagatgaaagaaatgattgaaagtgataaaataaaaatataaataaattgcgggaaataaaatggatatatgttaggtcatcacctatataatgaaaataaaaaaaagagccattttaaataaaaagaaattgcctagctatacaatactttctatagatctattgagtgaattgttaagagaaaaatgtcaacaggcaatctaatattaagttatgagcgatttgatttgaaagatattattaattttaatcaaattattggaaaaatacatatcggaaatgtgtatattgaaaccataaagggaaaagtgcattattcgaagacaggtgctcatatagtaccttatattgataagtaggtgaaaagtattgagaattgaagatgcatatcgtaaagatgttattattacgcttttgaataatgaagaatacgaagggtttgtaactgactatgaaaatgaattcgagagcgaaacaggaaatctagttgtagatatacagactgattttgctgtttattcgtttgatgaaactgagataaaaagtattagattattaaaataattacaaaatagcatcctttctacacagataaagagaaggtggtgctatttttatacacttttttaactatttactgaaatagcagaatcacaaaagttaacatatttaaaagaacttggtgaagatggcgaatataaatatgttgccaaaatagatagtaaaacatctaaattatgtcattcactcaacggaaaaatatttaaagttaaagatatgataccaggtgtgaatgcgccccctatgcatccttggtgtagaagtaccacagtgtcacatgtcggcaattggcgagacaagttctttaaagagcgtgaaggtaaacacaaggtagaaggttcttttattgaatcgggtgcacttaataataaaagtgacgaatacggtatcaaaaggaacagacaagctcaaatttattataattcagttagaaatcgagataaacagatagagatttctaaaattgctaaaaatactaatataaataaaaatacaattcaaagagtttatgaacatatatttgaaaataagtatttattggaaagtggatttaaacaatttgatcctgacttttatatggctcaaagttggcaacgtttaagagaagggaaaaatattaaaaaaatggatataataatgttgaaacatgaagctcttgaacactatctaatgaataagtataatttgaactatatagaggcacataaacttacagaaataaaatataattatagtattttaattaattagaggtggaaatgattgctaatattaaaaataaaagaaattaatgataaaagtgttacatataaatattttcctaataatgatgaaaatattaagcctggtattattcaaatggatatagatagtcttgaagttatcaatgctgaaaaatctagtttagaaaaaaatacaagagataattattttattcatgccatagacagaatatacataaatactagtaaagggctatttcctgaatctgaactcgtagcatggggataaagaaagtttacttaaaaaaatttcatatttaattttaaaaattttaaccttctaacgtgaaggttatttttattgtccaaaacgtgctgatgacattttaaaagcaagtatggaatatcaggcgacagactataaacggaggtatatctcatggaaaataatgaaagtaatattactgatgtaactcagaacgaagagcaactagacaacagtgatgaacaatcacaacagaatgagaaaacattttctcaagaagaagtatcacaattgattaaagagcgtatagctagagaacgcaaaaaatcagatgaacgtattaaagatgccaaagaaaacaatgatagcaatgaagtagcttatttattaaaaggtggtaaagttacaaaagtatatggcaatcaaaatagtgtatcttttgtgccagggtaacaagcaaccgaattgttatttgacagtaaacctaattcaattgttatgttacataaccatcctggccaatcaggattttcagaatatgatttatttacattttttaagcatccatcaataaaatcaatgacaatcgttactaataagggacaagtaaaatttattaccaagtcagataggtttcaaggtaaaatagtgagtaaattttgtgctaaatattttacgcatattaatatcattaatgatagccatattgaaaaattattgaaaaaactttatagtataaatatgattaaatataaagtgagatgattttaattatgttagattcacgattagatggaaatgtaactgcaaaagaattgagtgaatcttttaaagaattagttgaagaatttgaacgcatagaaaaagcgaataagaattcaaattcaaaagataaatagcatcctttctacacagataaagagaaagcggtgctatttttatacacttttttaactatttactgaaaaagcagagtcacaaaagttaaaatatttaaaagaacttggtgaagatggcgaatataaatatgttgccaaaatagatagtaaaacatctaaattatgtcatttactcaacggaaaaatatataaagttaaaggtatgataccaggtgtgaatgcgtaacctatgcatccttggcgtagaagtaccacagtgccacatctcggcaattggcgagacaagttctttaaagagcgtgaaggtaaatatcgggtagagaacaaaaaaatgaaaaagaaaaattacaataaaaagctaaaaaagaaatgcttgatatgataagtaatggtaaaataaagatgcaattgaataatgaaaaacaacagcatcatatttttaaacacaaatgaatataataacaagaaaaataattcatctttcttacccagttatattacaatagattctaatgaaattgaaaagatgactaaaaaagaatttattgattttccagttttgtttgatgatgaagggaattttagaaaaaaacaagttatagattacaaaaagataataggtaaatcttatgtgaatggtaaatatactgaaatgaaattaggtgaagttcattattctaaaactggttttcatgtagttccgtatattaaaaaggagtgattaaaaatgaatttacagtcatacataggcaaattagtcaaattaacgcttactaataataaaatattaattggaaaagtgatagactttgatgataaaattgataattttgatggttataattcgatagaaattgatacaggtagaattacatatgatatatcagaaaataaaattaaagacatacaaataattacaaaatagcatcctttctacacagataaagagaaagcggtgctattttttgtgcttttataacaactaaggatacaagacatataccttcaacaatatcctcatctaaacctatcgatttcctaagctcaattttaaacacaaattttatttgtaaagatgcacacctataaaaatcttaatcatcgaaagtcacaaacatctccatattaaaaacttaaatagtgcatttcatttaaactaaacatcgatattcctaccaataaaaacttagtaattcgattgttaatacattactttcattaaataactataaccatcataatacttctcaaatgtcgtcaaattaaagtaaatacagcacaaattaacatttttaaatatataaaataaaacaagatactcaataatctgtagtaccttgttttggaataatgtaattttatatcatcaatggcttcaaatgattagtttcatatataaataaacacaactactcaactgatcttgattaattaataaatgatttgccagatgacatataacagcattattagattaattctaatagtttatttaaattttcttcggttgtcgcccagctggttgcgaatctaacaacacgatgttgatcatcgtatttttcccaaacagcaaatttaactttttgttctaactctgctattttctcgttacttaaaataaaaaattgttgattggttggagaatcaaaataaagacgatagcctttatttataaacccgtctttcatcttatttgccatttcgatagcatgtctgcttatattaaaatataaattatcggtaaataattctagaaattgtatacctgttaaacgtccttttgctaaaagggcaccgtgatgtttgattcgagtggtaaattgttttggttcattattttttgtgaaaacaatagcttctccgcaaagtgcaccaatcttcgtaccacctatataaaatacatcacaatatttagcgatatctttaatagtcatgtctgattggtcactcatcaatccataccctaatcgtgcaccatccataaataatggaagctgatattgcttacatactttacataactcttccaattctgatttagagtataatgtgccatattctgtaggatgagaaatatataccattcctgggaataccatatggtcctttttaaaatcacttttaaatgtctccatgtaagtttcaacatctgaagcactaacttttccttccttagatggtatagtaattactttatgtccactatattcaattgcaccgccctcatgcacagcaacatgaccagtgtctgctgaaatgaccccttcgtaactttctaacattgaattaataacaacctgattggtttgcgttccacctactaaaaaacgaatagtagcatttggacagtcaattgtatctttaatcttttcaattgcctgagctgtgaattgatcaaagccatatcccgatgcttgtacaagatttgtatctactaatcgttttaatactttttcatgagcaccttctaaataatcattttcgaatgaaatcactacatttccccctaaaactaatatcaacattttaataagataaaccaatttcaaaactagttcgatatttaaaatgtattatgaatggttaaagtttgtatcgcattatcgcgaagttgaataaatatattatacatcaaacaatacattatgaaaattaattaattttttatcgcaattactttgagtgccgaaacacatatattaatgattgaattttactgttaaaagttctatgatttaggaaatagagaaaagaggggatttaaatgcaacaaattaaacttaaaacttttacagctgagactttagaattattagaatcaaatatcaacgaatttttaggttctgaagaagctgcaaatttgaaattagtaaatattacaattaaagaaattgaggaaagaacatttccaaataatgaagaagagtttaatgcaatattaactctatctgtaaataaataatctggaacgaaaggtacaaaagttttttgtgcctttctttataggagaaataaactatgcaattttcattttcaaatgatttaggaacactttttaccattattttagcaattgcctttatcattaatttggttctagcgtttattattatttttttagaaagaaatagacgtacagccagttcaacatgggcgtggttatttgtactttttgtattaccattaattggttttatcctttatctattttttggaagaacggtttctgcgcgtaaactaaataaaaataatgggaacgtgttaacagattttgatgcgcttttaaagcagcaaattgaaagctttgataaaggtaattatggtacagataataaacaagttcaaaagcaccatgatttggtacgtatgttgttaatggatcaagatggctttttaactgaaaacaataaaattgatcattttattgatggaaatgatttatatgatcaagttttacaagatattaaaaatgctaaagaatacatccatttagagtattatacattcgctctagatggcttaggccaaagaattttaaaagcgttagaagagaaattgaaacaaggtctagaagtgaaaattttatatgatgacgttggttcaaagaaagttaagatggctaattttgatcattttaaatcgttaggtggagaagttgaagcattttttgcttctaaattaccgttattgaatttcagaatgaataatagaaatcatagaaaaatcatcgttatcgatggtcaactaggttatgtcggaggatttaacattggtgatgaatatctaggtttaggaaaattagggtattggagagatacgcatttacgtatacaaggggatgcggttgatgcactgcagttgcgatttattttagactggaattcgcaagcacatcgacctcaatttgaatatgatgaaaaatattttcctaaaaagaataaatcattcggtaatgcgccaatccagattgctgcaagtggtcccgccagtgactggcatcaaattgaatatggttatacaaaaatgattatgagcgctaagaagtcggtatatttgcaatcgccttatttcattccggataactcatatataaatgccattaaaattgcagctaaatcaggggtagatgttcatctaatgattccatgtaagccagatcatcctttagtttattgggcgacattttcaaatgcatctgacttattatccagtggtgttaaaatttatatgtatgaaaatggatttatacattctaaaatgtgcttaattgatgatgaaatcgtatcagtgggcacagcaaatatggactttagaagttttgaattaaattttgaagtaaatgcctttgtatatgatgaaaatcttgctaaagatttaagagcggcttatgaacatgatattacaaaatcaaaacaacttactgaagaatcttatgctaatagaccattgtctgttaagtttaaagaatcgttagctaaattagtttcgccaattttataaagaatactttcaagtctcattttaatgaggctttttttatttctacaattaataactataataatattatgtaaatcaacgaagtgacaaatgtcattttgaaccaatgacaaagtatcctattttaaatcgaataaatttactaatcttaaattaataaaatattaagaggtggttcatttgattcaaatatctaatattaataaatcatttaagaaaaagagtgttttaaaaaacatttcatttgatattgaaaaaggctggatctaaatacaaacaaaaaagtattgagtgttttgatttaagagactttgaaagtgagtcaataatcaaaatcttactcaatacttttattttggtactcgcaagttagatttgttaactaattttttcgtttattataaaacgaaacaatcaggtatacgataaagcctacaaagatacccaataaaatagatagtactgctgtcactattaatggtaatttgaaaaatatttgtaggaaaataccaatgataattgcgataattactgcaattaatgtgactgtattttcatttgaaatgttcattcattttcactccttaacaataacattatatcatgctatagctttccaaaatattgaaatatgtagatatggctattgacgatatttcttaacttttatatgattaatcggaatgaaaaaagagaagtaggtggcaaaatgaagtcaaataaatcgcttgctatgattgtggtagccatcattattgtaggtgtattagcatttcaatttatgaatcatacgggtccttttaaaaagggaacaaatcatgaaactgtacaagatttaaatggtaaagataaagtacatgttcaaagagttgtggatggtgatacatttattgcaaatcaaaatggtaaagaaattaaagttaggcttatagggattgatacgccagaaacggtgaaaccgaatacgcctgtacaaccatttggcaaagaagcatcaaattatagtaagaagacattaacaaatcaagatgtttatttagaatatgataaggaaaagcaagaccgctatggtagaacattggcgtatgtatggataagtaaagatcgtatgtacaataaggaattagtggaaaagggacttgctagagagaagtatttttcaccaaatggcaaatatagaaatgtatttatagaagcacaaaataaagctaaacaacagaaattaaatatttggagtaaataattaaataggtgattatatatattaaagtaaaatatacttgaagcatcgatttattattaccataaatttatatatagaaataatttaaaggcataataaccatagtgcgtatcgagcgtaatggattattatgccttgattttacttgaatatagctgtgatttgatcaacctgttctttatttaaagggtgtttagatagctctatggcttcgctaataatacgtcgtaacgaagattttgttgaaactgtatcaacatatttatctctttcttcagaaccttgaatgatattaactgtaccatcactaaagtaaataacaccggtactttggactttaaagttaaagttttgttcaatatgatcctttaatgctttagcattatttgctgctaattgatacggatcataatcataaaaatcataaataacacgatttggttgaactgtttctgtaaaagtatagatagactttcttgatgaattaaactgatcatgatattgctggctaatgtaatgaccgacaactttttcaatattactattgctcatttctgtatcatgctcatcaggtacatcaaagtgataaaatgttttttcaccccagctttttacatcaacgtttattaaaccgatatctgaaacaatgataaaatcaaatgaacgtgcatactcgaaaaacggatgtttagtagctaaattgcttgtaacgataatatcgtaatattttaatttaccattttcgagatagctatctaaaatcttgcgtaattctcttttagcatttttgtatgcatggtggccaacatcattattagaactcagcatttgacttcttaattcagcattttctgcacttaatgctttgttctttttaataagttgctttcttgcataaacttcggtatctattttactattactatacctttgatttaaaactaatataccaattaatgctacaatgataatgataagtacaacataaaaagacattttttcaccaatcctttttgacttctttaactttgtatacaataataattaataaagattaattgttattcaatttcccacatttttattagttgattttagttcatcattgttataatcaaattataaactgacagatattgatgttcaatgaatatgacgtgaaagattcgtgaattcaagtttatgtcgaatttatgttataacggtcatttaaatgacagaattaggtcactcatagtattttgaagattgaattcattaattttaaaatgtataatgatatttatgaaagcgcttgcttaggaggtgtatttgagagtgaatgaaatgaatgctaaagaacaattagtggacaatttaatgaaaacatcatcgcaattatttaaatttcacggtgaagttgccatgcagcttttcttaaatgatgaattaaaattaccttctattgttgaaatatgcgtggaacgtaagcgtttaagtgatattgtgaaagttattccgcaatcatatgcgttactatacatagataagcaagatcaagcaatagctaaagaagatttatcactttcaaaaattgcaaaagtttatgtgcaatatgatgatacaacaataatgagtattttcgtttatgatgtagtaaacgatgaatggatttttagattggatccgaatatacgtatacctaagagtaacatttacttccatagtttaaattgggatgtagattatattaaaccggagatcgttctaatgtatgatctaatgcaacaccatcagtatcatcattattccaattataaacgtgtcatagatgcattaagctactatcaattttttattttaaaatttgtagtaggtgagcaacgtattaaggatgcaatccagagaacaataaataattaagaaaaagcaattcataacgcagttgaatacatgtgttacgaattgcttttatattagtttttatcacacaagttctttaatgcaaccccgtgatagcaaaactcatatgtagataatacagctttttcagcatcatctacatgaattccaaacatcatcgagatttccgaagcaccttggttaatcatttttaagttaatttttgattcagctaaggcatgtgtaattttatttgcagtaccgatgactttattcataccttcgccgacaatcattaaaattgctaaatcatgctcaatacttagctcatcaacatcacatttttgacgaatttcatttaatacttttgtttctttgttttgaatttgttttgaacgcataacgatactgatagtatcaatacctgaaggcatatgatcaaatgaaatattattatcctctaagacacctaatatctttctagtaaagccgacttgtctattcattaaatactttttgatattaataacagtaaaatctttatcgcaacttataccgctaatcacatttttcgcatttatttctctatcatgcactataaatgtacctttatcttgagggcggttcgtatttttaatcaccacagggatgcgatctttataaagtggttgtaaggcttcatcatggaaaacactaaaaccagcataagataattcacgcatttctcgataagtgatttcttcgattaattcaggatctttgatgatatttggattagctttataaataccagacacatcggtgaaattttcataaattgtagctctaacaccacttgatatgatggcgccagttatatctgatccgccacgtggaaatgtaactatatatccctcatgagatacgccaaaaaatcctgggataattagtttctcatcataatctcttaattttttaatttcagagtaagcactatctaatatttgtgcttcttgtgggacgtcagtaacaaaaatacccgcttccttcggtgatatatattttgttggtataccttgactattattatataaagctatcaattgcgcattaaaatcttcaccacaagaaagtaatgcatctaatagtctcttcggttcattttttaattgattaatataatgttccaaagtcacatctatcgtccgtaaaatactttcatccatttgcaattcttttacaatatcatcataacgctgaataatttctctttttttatcatgataatcaagatgattaatgaccttttcatataatctgattaacaaatcagttgttttaatatcattatcatgtcttttacctggagcagaaacgataacaatctttcgctctggatcagaataaataatatttaaaacctttttaatttgagtagcattggagacggagctaccaccgaatttggaaactttcatagtgcatgccaacctttctaaaaaatcagaaaattgtattcagttttgtaagtaagaatgatattatgtatttatattttgaatattacgaactttacaaaaataaagaataattctatactatactatcatctagtgtttttcaataatacatttgtttttctcaaaagcacaaacggaggtacataaaatgaaaaaattaaatatagcattattaggattaggtactgtcggatctggtgttgttaaaatcatcgaagagaaccgacagcaaattcaagatacattaaataaagatattgtcataaagcatattcttgttcgagataaatctaaaaagagaccgctaaatattagccaatatcatttaactgaagatgttaatgaaattttaaatgatgattcattagatattatcgttgaagtcatgggaggaattgaaccaactgtagattggttaagaacagcacttaaaaataaaaaacatgttattaccgcaaataaagatttattagcagtacatcttaaacttttagaagatttagcagaagaaaatggtgtagctttaaagtttgaagcgagtgtagcaggtggtattccgatcgtaaatgccataaataatggtttgaatgcgaataatatttcaaaatttatgggaattttaaatggtacctctaattttattttatctaaaatgactaaagagcaaacgacatttgaggaagcacttgatgaagcgaaaagacttggttttgctgaagcggatccaactgatgatgtagaaggggtagatgcagcgcgtaaagttgtcattacatcatatttatcatttaaccaagtcattaaattaaacgacgttaaacgaagaggaattagtggtgtaactttaactgatattaatgtagccaatcaactggggtataaaattaaattgattggtaagggaatatatgaaaatggcaaagttaatgcatcagtagaaccaacgttaattgataaaaagcatcaattagcagctgtagaggatgaatataacgcgatttatgtcattggtgatgccgttggtgacacgatgttttatggaaaaggagcaggcagtttagcaacaggtagtgccgttgtcagtgatttattgaatgtagcattattctttgaatcagatttacacacattgccaccacattttgaattaaagacagataaaacaagggaaatgatggattctgatgcagaaattaatattaaagaaaaatccaatttctttgtggtagtgaatcatgtcaaaggttcaattgaaaattttgaaaatgagttaaaggcaatattaccattccaccgatcattaagagttgcaaattacgataatcaatcatatgccgctgttatagttggattggaatcatcaccggaagaattaatcactaagcatggatacgaagttgacaaagtatacccagtagaaggagtttaattataatgagaagatggcaaggattagtagaagagtttaaagcacatttaccagtaaatgaaaatacaccaaaattaacattgaacgagggaaatacaccactcattcattgtgaaaatatgtctaaaatactaggtatagatttatatgtgaagtatgaaggtgccaatccgacaggttcatttaaagatcgcggtatggtaatggctgtgacaaaagcaaaagagcaaggtaagaaaattgtaatatgcgcttcgactggaaatacatcagcgtctgcagcagcatatgcagcgagagcaggtttaaaagctatcgtcgtaataccagaaggtaaaattgcattaggtaaattgtcgcaagcagtaatgtatggtgcagaaatcgtttctattgaaggaaactttgatgaagctttagaaattgtaaaagaaattgcaaaaagtggcgaaatcgagcttgtaaactctgtcaatccatttagaatcgaagggcaaaagacaggctcatttgaaattgtgcaacaattagacggtgaagcacctgatattttagcgattcctgtaggtaatgcaggtaatattactgcatattggaaaggctttaaagaatatcatgaagctaaaggatcacaattgccgaaaatgtttggcttccaagctgaaggcgcatcaccaattgttcaaaataaagtcattaaaaatcctgaaacgattgcaactgctattcgaattggtaatcctgctagttgggataaggcgactaatgctcttaaagaatcaaatggattaatagatagtgttactgatgatgaaattctagaagcatatcagttaatgacaactaaagaaggtgtctttagtgaaccagcaagtaatgcttctattgcaggtttaattaaattgcatagacaaggtaaattacctcaaggtaaaaaagtagttgcgattttaactggtaatggattaaaagatcctgatactgctatttcactactagataatccgataaagccattgccaaatgataaagatagcattatcgattatattaaaggagctttataacatgtcgaatgttttggagttaacaattcctgcatcaacagccaaccttggagttggctttgattctataggtatggctttagataaatttttacatctgtctgtaaaggaaacatcagggataaaatgggaatatattttccatgatgatgcatcgaagcaattacctactgacgaaacaaactttatttatcatgtggcacaacaagttgctgctaaatatagtgttgacttgcctaatttatgtatcgaaatgagaagtgatattccattggcaagagggttaggttcgtcagcttctgctttagtaggagctatatatatcgcaaattattttggtgatatccaactatctaaacacgaggtattacaattagcgactgaaatcgaaggacatcctgataatgttgcaccgaccatttatggtggtttaatcgctgggtattataatgatgtctcgaaagaaacgtcagttgcacatatcgacataccagacgtggatgtgattgtaacgataccaacttatgaactaaaaacagaagcatcaagacgtgctttaccacaaaaattaacacatagtgaagcggttaaacgtagtgcaattagtaatacaatgatttgtgcattagcacagcacaattatgaattagcaggtaaactcatgcaacaagatggctttcatgaaccgtatcgtcagcatttaattgctgaatttgatgaagtgaaaacaattgctagtcaacataatgcctatgcaacagtgattagtggtgctggaccaactattttaatatttagtcgcaaagaaaatagtggcgaattagttcgcgctttaaatagaaatgtagttacatgtcattctgaattagtagatattaatgttagtggtgttaaagaacgaattgtataccaatagacactttatattgtaaaatagtattgaatgtgaaatagagaggagatttaatgcgatatgacaaattataaagttgtcgttttagatatggatgacacattgctaaattcagataatgtgatatcagaagaaactgcaaattatttaacagcaattcaagatgaaggttattatgttgttttagcatctggtagacctactgaaggtatgattccaactgctagagatttaaaattacctgaacatcatagctatattattagttataacggcagtaaaacgattaacatgactaatgaagaagtagaagtaagtaaatcgattggtaagcaggatttcgatgaaattgtagattattgtcgagatagaggctttttcgttcttacatatcatgatggtcaaattatttacgacagcgaacatgaatatatgaatattgaagcggaattaacaggtttaccgatgaaacgtgttgatgatatcaaagcatatattcaaggcgatgtacccaaggtcatgggagttgattatgtagcgaatattactgaagctagaattgatttgaatggtgtgttcaatgataatgtagatgctacgacaagtaagccattcttcttagaatttatggccaaagatgtttcaaaaggtaatgcaattaaagcgttatgtcacaaattgggatattcggtggatcaagtcattgcttttggtgatagtatgaatgataaatcaatgtttgaagtcgcaggtctagctattgctatggggaatgcatcagatgaacttaagcaagatgcagatgatgttacgttggatcataatgaaaatggtattccacatgcgctcaaaaaattgttataaattttaaaataagcctaagcacaggatatttgaataagattgaaatgctcccttcaaagtagacattgaaaaaatgaaagctttgaagggagctttatttatgtgaaaatgacttcagttatactatggaggatttgaaatacatattatagattagtaatgatatctagcgaatagagtagatgtatatttttaaaataaatcatgtattaactagtcacggaaggtagataaataaatttgaatcattctgaataagaacgaatgtattaaaaaatgcagtgacaatctaacattaattgttaaaatcactgcaagcatcttgattttatttagctgtttgtgtccagtcatgcttccctctgaagcgttttacatgagcatatatttggtcagcagtataatctaaatttgtataaactgtaatactgaacgctgattggttttcagcaaatgattcttcggaaaataattcctttaagtgcgtaaataaatcattcatttgtttatggtttaaaccgggatattcccttaaagttctctttaataattgtccgttcttttcttctaatgcttgaactacaataacaaatctctcatcttgctttagtacatcatcaaataaatttgtttgtccaatcattgaatttcacccctgaaaagttattgttatctatattatacacgatatgcaaaatatctaaaataaagaatggtaacatggtcataataaaatataaacagaatactagttaatacactttatactagaaaaagatattaaagtatatctgctttacaccattaaaaagcggcaaatgctatagataatctaaagcatctgccgtgtgagagtttatttatttttgattgtcataatcgtgtggttttaaattaattgtttctagctttacaaattttgttttgtgaatgattttatgaataaagtaaatcaacgctagaatgattaaaggtaaaaagtttttaaaagcatttaaccattgatcctttaaaacatattcaactgaaccaccaaatagcaagaataatagcgtagtgatgacaatgattggtcctaatgggtaaaaaggtgctttatatggtaggaccttattaggatcttgaccttgttttttaatagcttgtcgcaatcgtatttgtgaccaaatgcttgatccccaaacaactataatcattgaaccaataatttcaagtaaattaaaaacggcatttgaattaaagtttgcataaataataacaataacaacgactgcataagtagttaataatgctcttaaaggtaactttgttgtcttgtttaatttacttaaaaattggggtgcttttttgtctgaacttaaggaatacaacattcttcctgttgtataaacacctgaatttgcagcggataataatgaagttaaaataaccgcgttgattactgatgctgcaaaggctatgcctactctatcgaatacaattgtaaatgggctttgacttattgaactacttgctcttaataatgatggatctgtgtaaggaataattgcaccaattactgcaattgataagacatagaataaaagaatacgccaaaatacttgtttaattgccttaggcatagactttttaggatcatctgattcaccagcagttactgctactacttctgtaccaccaaccgaaaatccggcgactaataatacgcctaagaaaccagagataccaccaacaaacggtgcttggccttttgtatagttttcaaatccatatgcatgaccacctaagataccgaaaatcattaaaaagccaaaaataacgaaaacgataattgttaacactttaatcaatgataaccaaaactcagtttctccaaatgattttacagaaaaaatgtttaataatagtaaaattgtaataaagattaagctccaagtaatggggtggaaaaatttaaatgtgtcccagaaataaagcacatttgacgctactatgacatcaacacttgtaactaatgaccacaatgcccaatacaaccatcccatggtaaagcctagagatgagtcaataaagcgtgttgaataagagctgaatgaacctgatactggataaaatgttgccaactctccaattgatgacattaagaaatatagcatgacaccaataacaagataagcgagtatagcgcctccaggaccagcttgagaaatgatattaccagtagctacaaatagaccagtcccaattgcaccacctatagcaatcatggaaatgtgtcttgagttaagactacggttcattttattatcttccatatttagtctcccatctatttaaatatacccattattgtaagctttttatgtgtactattcaataactatttagcactgtaaagcgaaaaaattaaaattttctgattttttaatcatcttgagcatgtttaattgtaattctgatggggttaaattataatatgtattaaattataattattataaattgtggagggatgactatgtcacaacaagacaaaaagttaactggtgtttttgggcatccagtatcagatcgagaaaatagtatgacagcagggcctaggggacctcttttaatgcaagatatttactttttagagcaaatgtctcaatttgatagagaagtaataccagaacgtcgaatgcatgccaaaggttctggtgcatttgggacatttactgtaactaaagatataacaaaatatacgaatgctaaaatattctctgaaataggtaagcaaaccgaaatgtttgcccgtttttctactgtagcaggagaacgtggtgctgctgatgcggagcgtgacattcgaggatttgcgttaaagttctacactgaagaaggaaactgggatttagtagggaataacacaccagtattcttctttagagatccaaagttatttgttagtttaaatcgtgcggtgaaacgagatcctagaacaaatatgagagatgcacaaaataactgggatttctggacggggcttccagaagcattgcaccaagtaacgatcttaatgtcagatagagggattcctaaagatttacgtcatatgcatgggtttggttcacacacatactctatgtataatgattctggtgaacgtgtttgggttaaattccattttagaactcaacaaggtattgaaaacttaactgatgaagaagctgctgaaattatagctacagatcgcgattcatctcaacgcgatttattcgaagccattgaaaaaggtgattatccaaaatggacaatgtatattcaagtaatgactgaggaacaagctaaaaaccataaagataatccatttgatttaacaaaagtatggtatcacgatgagtatcctctaattgaagttggagagtttgaattaaatagaaatccagataattactttatggatgttgaacaagctgcgtttgcaccaactaatattattccaggattagatttttctccagacaaaatgctgcaagggcgtttattctcatatggcgatgcgcaaagatatcgattaggagttaatcattggcagattcctgtaaaccaacctaaaggtgttggtattgaaaatatttgtccttttagtagagatggtcaaatgcgcgtagttgacaataaccaaggtggaggaacacattattatccaaataaccatggtaaatttgattctcaacctgaatataaaaagccgccattcccaactgatggatacggctatgaatataatcaacgtcaagatgatgataattattttgaacaaccaggtaaattgtttagattacaatcagaggacgctaaagaaagaatttttacaaatacagcaaatgcaatggaaggcgtaacggatgatgttaaacgacgtcatattcgtcattgttacaaagctgacccagaatatggtaaaggtgttgcaaaagcattaggtattgatataaattctattgatcttgaaactgaaaatgatgaaacatacgaaaactttgaaaaataaatttgatatgtagtttctatattgcgtagttgagcagtttatgatatcataataaatcgtaaagattcctaacaagagagggtgtttaacgtgcgcgtaaacgtaacattagcatgcacagaatgtggcgatcgtaactatatcactactaaaaataaacgtaataatcctgagcgtattgaaatgaaaaaatattgcccaagattaaacaaatatacgttacatcgtgaaactaagtaattcttatcattcaaatacgacgatttgaaaataaagcgggcttacctattatattggggagctcgcttttttatgaaatttttgtgaagagtgattaatgaattgagtttcatcgatagaacaatttatgattgtattagttgttactttattaaaatttgagaatatttatagaaggaaatagattactgattttataaagtcattttgttagcgaatgcttgaaagagtatttaatatagtagaatttaaaatttcaaagcggaatttaataagtacgaagtaattgtggatatgttttataaatgttcgacaatacattttaatgttaaatatgatggtttagaaaataatttaacaaagaaatgaaactttactgttgaattatgtgaggattgtgttattatataaatcgtaataattacgatttgataaaaagtgaggtaactatatatggctaagaaatctaaaatagcaaaagagagaaaaagagaagagttagtaaataaatattacgaattacgtaaagagttaaaagcaaaaggtgattacgaagcgttaagaaaattaccaagagattcatcacctacacgtttaactagaagatgtaaagtaactggaagacctagaggtgtattacgtaaatttgaaatgtctcgtattgcgtttagagaacatgcgcacaaaggacaaattccaggtgttaaaaaatcaagttggtaaaatcaaatttcgtactttagcccatttacaatatcaataaaacaatgtacagtatatacgaatgctataaactgaatgttttctcatattaataaggaaacattcggtttttaatttgcatttaaaaataattagtttttaaaggggctatttaaagtgaaaatatttgattacgaagatattcaattaatacctaataaatgcatagttgaaagtaggtctgaatgtgatacaactatccaatttggtccgaaaaaattcaagctacctgtagttcctgcaaatatgcaaacagttatgaatgagaaattagcgaaatggtttgctgaaaatgattacttttatatcatgcatcgttttgatgaagaagcaagaataccttttataaaacatatgcaaaattcaggcttatttgcatctatttcagttggtgtaaagaaagcggaatttgattttattgaaaagttagctcaagaaaaattaatccccgaatatattacaatagatattgcgcatggtcactcagattcagtgataaacatgattaaacatataaaaacccatatacctgatagttttgttattgctggtaatgttggtacgccagaaggtgttagagaattagaaaatgctggtgctgatgctaccaaagtcggtataggtcctggtagagtttgtattacaaagattaaaacaggttttggtactggtggttggcagttagcggcattaaacatatgtagtaaagcagctcgtaaacctttgattgccgatggtggtataagaacgcatggcgacatcgctaagtcaattagatttggtgcatcaatggtcatgattggttcattatttgcggcacacgaagaatcacctggtgaaactgtagaacttgatggtaaacagtataaagaatattttggtagtgcatctgaatttcaaaaaggcgaacataaaaatgtagaaggtaaaaaaatgtttgtagaacataaggggtcattaatggataccttaaaagaaatgcaacaagatttacaaagctcaatttcatatgccggtggaaaagacttgaaatcattacgtactgtagattatgttattgttagaaactctattttcaacggtgatagagattaatatttatagtaggtgatgtaaattaaaaaattcatagtaactgttgttgcgtttttatcaattattatcattgcgccaataacagaatttaaaccattcattcatttacaaaatgaagtaagacaatatattgacattcacatcaataaagaaacaatttctgcggaaaataaattggatacgccgaagaaacaacaatttgcctttaacaatatacaaatgaacatgtcgaaatcagatgttgagaaaacattaaataaaccaaaaagagtgacatttaatgaatatggtacgaagtggtatacgtattatgatgacgattacaataattttataatgataagttacattaaagataaagttaatgcgttatatacaaatcaaaatatcatcacttcaaaatcaaaaattaaatacaatacaccgaaatcggttgtaaggcaaagattaggcgaaccagaaacagagattgttaaaggtagagtgcgttacgaacaaaataataaagaatatgatgttttccataaaaatcacatttatacgacggtattttatgataagcatcgacgtaataatgtaacagctgttttacaagtaagtgatgctatggaaaatagattaaaagaacaatatggagcaccttcgaaatcgcttgcagatagttttgaactacaaaattttgatttagttaatgctgaaagaaaacaacatcaattatctacattgaagtattctaaacagaattctgaaactgctcgtaagcatagtaaagatatggccaaaaatcattattttgatcatacaaatttaaaaggtcaatcaccatttgatcgattgaaaaaagatggtattacatttaactcagccggagagaatttagcatatggtcaagttagtagtatctatgcacatcaaggattaatgaattctattggtcacagaaaaaatattttaaatgatacgtttaaaatattaggtgttggtgttgattttaatgatgaaaaacaacctttttggacagaaaattatactggttaatgtttttggtatgagtttaaagggtaatgtttgtctgtaaggaagtagataaacatgatgacaacagataaaccaaaagatgcggatatacttgaacgcgtcaaagatatacttaataaaaaagaaagaaaaaataataatggctcgctcctgtaaattattacgggggcgagttttaatttgtgtaacattttgcaggaatctgtaattcaaaatttatattaaagaatgagattatctaacaattcgcaatttctgtttgaactgaatttagattagaataaataaaacctcttgaaaacgaaactttttcaagaggtccaaaatttataaaaatgagggtttaacaattacgataatatataacggtttaaaatattacatttcgcggtacaaaccaattactttcccaattacagcaacattgtcgaggtaaattggctccattgtactattttcaggttgtaatcgataacgatttttttctttatagaagcgtttgacagttgcttcatcttcctcagtcatagcaacaataatgtctccattttctgctatggtttgactgcgaacaattactttgtctccgtctaatataccagcctcaatcatactgtcgcctacgacgtttaatatgaatatgtcgctattatgtgtcgatgttaagtgttcaggtaatggaaaatactcttcaatattttctactgcggtaataggaacacctgctgtgactttaccaataactggcacatgaatcgtttcttccatattaatattatcatttgtttgatcacttacaatttctatagcacgtggtttcgttggatctcttcttatatagcctttttcttcaagacgtgaaaggtgaccatgaacagttgaactggatgctaagccaactgcttcaccaatttcgcgaacactaggcggataacctttcatttgaacaacttgtttaatatagttatatatttcgctttgtcgttttgttaattctctcatatataggcactccctaaattaatttaaatacagtatatcattaattcacaaccaaaacaaacatttgttcgttaaaatattgacgcagaacataagttctgataaattacttatacaaacaaatgttctaggagtgaaaatgatgttttacaataaatataaaaacgtatcaacatatatcattatatttttagtttcaagtgcagcctttgcaatattcttgttaagtgcgaacgttagtgctcactcggaacaagtgtacgaaatgactgaccatcaaattaagaacaatacgataaataaagcatacgaacataaagaccctacaaacaatagcgaacaaagagatggtaaagtgttcgctttaataaattgatacattgtcacaacgttattttgcctatttttgcgaaatagcgtttttttattacttttttgctggtcttaaatttgttatattttgttaaagtattataatgattgaataaacaaattgaaggtaggttttttaattgagtaattctgatttgaatatcgaaagaattaacgagttagctaaaaagaaaaaagaagtaggattaactcaagaagaagcaaaggagcaaacagccttaagaaaagcttatcttgagagttttagaaaagggtttaaacaacaaattgaaaatactaaagtaattgatccagaaggtaatgatgtaacacctgaaaaaattaaagagatacaacaaaaaagagataataaaaattaaatcacaaatctgtaaagaattttctgacattataacttgaaataagtattttacttatctttttattttaaaataagttataatgtatttgataaaattgaagaagggaagatacacaagatgtttaatgaaaaagatcaattagctgttgatacgctacgtgcactaagtatcgacacaatcgaaaaagcgaattctggtcatccaggattacctatgggagctgccccaatggcttacactttgtggacacgtcatctgaattttaatccacaatctaaagattacttcaatagagaccgtttcgtattatcggcagggcatggttcagcattattgtatagcttgttacatgtttctggtagtttagaattagaagaattaaagcaatttagacaatggggttctaaaacaccaggccatcctgaatacagacatactgatggtgtagaagttactactggaccacttggacaaggttttgctatgtcagtaggattagctttagcagaagatcacctagcagggaaatttaataaagaaggatataatgttgtagatcattacacatatgtattagcttctgacggtgatttaatggaaggtatttcgcatgaagcagcttcatttgctggacataataaattaagtaaattagttgttttatacgattcaaatgatatttcattagatggcgaattaaacaaagctttttctgaaaacacaaaagctcgttttgaagcatatggttggaattacttactagttaaagatggtaatgatttagaagaaattgataatgcgattactactgctaaatctcaagaaggaccaacaattatcgaagttaaaacaacaatcggatttggttcaccgaataaagcaggaactaatggtgttcatggggcacctttaggtgaagatgaaagaaaattaacatttgaaaattacggtttagatcctgaaaaacgttttaatgtttcagaagaagtatacgaaattttccaaaatactatgttaaaacgtgctaatgaagatgaatctcaatggaattcattattagaaaaatatgcagaaacatatcctgaattagcagaagaatttaaattagcaattagtggtaaattgcctaaaaattataaggatgaattaccacgttttgaacttggtcataatggtgcatctcgtgctgattctggtactgttattcaagcaatcagtaaaactgtcccttcattctttggtggatcagcagaccttgctggttcaaacaaatccaatgtaaatgatgcaactgattatagttctgaaacacctgaaggtaaaaatgtgtggtttggtgtacgtgaatttgctatgggtgctgctgtaaatggtatggctgcacatggaggtttacatccatatggtgcaacattcttcgtatttagtgattatttaaaaccagcgttacgcttatcatcaattatgggattaaatgctacgttcatcttcacacatgattcaattgcagtaggtgaagatggtcctactcatgaaccaattgaacaattagctggactaagagccattccaaatatgaatgttatccgtcctgctgatggtaatgaaacaagagtagcatgggaagttgccttagaatctgaatctacacctacttcattagtattgacacgtcaaaacttaccggttttagatgtaccagaagatgtagttgaagaaggcgttcgaaaaggtgcctatacagtttatggctctgaagagacaccagaattcctattattagcttcaggttcagaagttaatcttgcagttgaagctgctaaagatcttgaaaaacaaggtaaatcagtgcgtgttgtttcaatgcctaactggaatgcatttgaacaacaatctgaagaatataaagaatcagttattccatcaagcgtaacaaaacgtgttgcgattgaaatggcttcaccgctaggatggcataaatatgtaggtactgcaggtaaagttattgctattgacggctttggcgcaagtgcacctggcgatctagtagttgaaaaatatggctttacaaaagaaaatatcttaaaccaagttatgagcttataagaataatttataaagcgagtatgtttagaagtctaggatgcataatcttaggcttcttttaaagtgttgaaatttagagtatagcactcaaactacatcataagtgataacttttgaaaatatactatttcagattaatctttaaaacctctgttataacagcatgatttttgatattatttttagtatcgatattaaaatacttgaataaactagttcttgaaataatgtgatgaatttagtaaaattcagtaggataaagaaagcgggtgaaacaatggcaacttggttagcaattatttttatagtagctgcattaattttaggtttaattggaggtttccttttagctagaaaatatatgatggactacttgaagaaaaacccaccaatcaacgaagaaatgcttcgtatgatgatgatgcaaatgggtcaaaaaccttctcagaagaaaattaatcaaatgatgacgatgatgaataaaaatatggatcaaaatatgaagagtgcgaaaaagtaaattcgcaattgatagaggctattttccagatatggaaatggcctctttttataatcaaatttataagaataaatatgtttattaaaattaaagttaacaaaatgacgaatagactgagaaatgctataattcattttgtatgatttacagagagtttatttaacgagaaggtgtctgcgtgctctatttattattttcaatcattgtagctttatttatgggaactatagttatagttattcgtatgaaagctcaaaattatccggtaaatgagaaaaaaatagttttgccaccgttttttatggcgactggtgcattgatgtacgtcgttccatattttaggctaacaggatcggaaatgctagaagcctttataattggtttgcttttttctacagttctaatttggacttctcgatttgaagtcaaaggtacagaaatttatatgaaacgatctaaagcatttccagttattttgatttcattacttatcattcgtactgtgatgaaaatattcattagtaatgaaatagatcctggagaattaggcggcatgttctttttattagcattctgtatgattgttccttggagagcagcaatgctatataaatacaaaaaactaaagaaaacattaatcaattaattacttttaaaaccacttgtgatcgacttttaaatcagtcaatgagtggttttaattttacttgaaaaggtgaaatgtttatattaaaataaaaagcgaacaaatgttctatatggaggcagtaatgaaaattatacatacagcagactggcacttagggaaaatattaaatggcaaacagcttttagaagatcaagcgtatattttagatatgttcgtagaaaaaatgaaagaagaagaacctgatatcattgtgatagctggagatttatatgacacaacatatccaagtaaagatgcaatcatgttattagaacaagcgattggaaagctaaatttagaactgcgtataccaataattatgattagcggaaatcacgatggtaaagagagattaaactatggggcgagttggtttgaacataatcagttatttataagaacagattttacatcgattaattcgccaatagagataaatggggttaatttttatacactcccttatgctactgtgagcgaaatgaaacactattttgaagatgacaccattgaaacgcatcaacagggaattacgcgctgtattgaaacaatagcaccggcaattgatgaagatgccgtcaatattttaattagtcatctgactgttcaaggtggaaagacatctgattctgaaagaccattaactattggaacggttgagtcagttcagaaaggtgtttttgatatatttgattatgtcatgctaggtcacttgcatcatccatttagtatagaagacgacaaaattaaatatagtggctccttattgcagtattcattttcggaagcgggtcaagctaaagggtatagacgtgtaacaattaacgatggcattattaacgatgtatttattcctcttaagccgcttagacaattggaaattatctcgggcgaatataatgatgttattaatgaaaaagttcatgtgaaaaataaagataattatttacattttaaacttaaaaatatgtcccatattactgatccaatgatgagtttaaaacaaatttatcctaatactttagcgctgacgaatgaaacttttaattacaatgaagaaaataacgctatagaaataagagaaaaagatgacatgtcaatcatcgaaatgttttataaacatataactgataaagaattatcggatatccaatctaaaaagataaaaaatattttagaaaacggattgagaaaggaggattaatgaatgaaaccattacatttaaagttgaataatttcggaccctttttaaaagaagaaattgatttttctaaaattgataataatgaattgtttttaataagtggtaagactggatcgggtaaaacaatgatttttgatgcaatgacttatgccttgtttggtaaagcatcaactgaacaaagagaagaaaatgatttgagaagtcatttcgctgatggtaaacagccgatgtcagtaacgtttgaatttcaattaaatcatcgaatttataaagtgcatagacaaggcccttatatcaaagaaggtaatacaacaaaaacgaacgctaaatttgatgtatttgagatggtggatggcaagtatgaaattagagaaagtaaagtaatttcaggtacccaattcattattgaattattaggagtaaatgcagatcaattccgacaattgtttattttgcctcaaggtgaattcaaacgctttttaatatcaaacagtcgtgaaaagcaagggatattaagaacactgtttgacagtgaaaaatttgaagctatacgagaaatattaaaagaagaagtaaaaaaagaaaaagctcaaatcgagaatagatatcaacaaattgaccttttatggcaagaaattgaatcatttgatgatgacaaaataaaaggcttattagaggttgccactcaacagatagacaaagtgattgaaaatataccacttttacaagctaggtcgaaagaaatactagcatttgtgaatgaaagtaaagaaactgctattaaagaatatgaaataatagaaaagaaaacactagaaaataatatattaaaagataatattaatcaactcaacaaaaataaaattgatttcgttcaattgaaagagcaacaacctgaaatagaggaaattgaagctaagttaaagttgttacaagatattacaaacctattgaattatattgaaaatagagaaaaaattgaaagcaaaattgctaatagcaaaaaagatatttctaaaaccaataataaaatattgaatcttgattgtgataaacgaaacatagacaaagagaaaaaaatgttagaagaaaacggagatttaattgaaagtaaaatctcttttattgataaaactagagtattatttaacgatattaataagtatcaacaaagttatctcaatattgaacgcttgagaactgagggtgaacaattaggtgatgaattaaataatctaatcaaaggtttagaaaaggtcgaaaattcaataggtaataatgaaagtgattatgagaaaattatcgaactaaataatgcgataactaacataaataatgaaattaatgtaattaaagaaaatgaaaaagctaaagctgaattagataaactattaggtagtaagcaagagttagagaatcaaattaatgaagaaaaaactatattgaagaatctcgaaataaaattagaacgctacgataaatcaaaattggacttaaatgataaagaaagctttataagtgaaattaaatctgctgtaaagattggagatcaatgtccgatatgtggtaatgaaattcaggatttagggcatcatattgattttgacagtattgctaaacgtcaaaatgaaattaaagaaattgaagcaaatatccacactatgaaatcgaatattgctgtgcataattctgaaattaaatttgttaatgaaaaaatatcgaatattaatattaaaacgcaaagtgatctttcactcgaagtattgaataagcgtctgctagaaaatgaaaatgcattgaataatcaaagagatcttaataaatttatagaacaaatgaaagaagaaaaagataatctaacgttgcaaattcataataaacaattgcgtctaaataaaaatgaatctgagttgaaattatgtcgagatctcatcactgaatttgaaacactctcaaaatataataatatcactaattttgaagtggattataagaagtatgttcaagatgtgaatcaacatcaagaacactcaaaggagattgaagataagttaatacaattgtctcaaagaaagttaattgagcaaaataatctaaatcactatgaaaatcaactagaaacttacaataatgacttagaattgaatgaacagtctattgaaatggaaatgtcgaggctgaatttaactgatgacaatgatataaatgaaataatagcctggaggggcgagcaagaggaattagagcagaaaagggatacttataaaaaatgttatcatgaatttgaaatggaaatagctaggttagaatcattaaccaaggataaagagttattggactctgataaattaatagatgaatatgaactgaaaaaaggaaagatgaatacactgatagatgaatactctgctgttcattatcaatgtcaaaataatattaaaaaaacacaatctatagtttcgcatattaattacttaaatcaagaattaaaggatcaacaagaaatatttcaattggctgagattgtcagtggtaagaacaacaaaaatcttacattggaaaactttgtcttaatttactatttagatcaaattattgctcaagcaaatctgagattagcaacaatgtcagataatcgataccaactaattaggcgagaagcggtttctcatggtcttagtggcctagaaattgatgtatttgatttgcattcaaataagtctagacatattagctcgttatcaggtggagaaactttccaatcgtcgcttgcattagctttagggttaagcgaaattgtacagcagcaatcaggaggtatttcactagaatcaatatttattgatgaaggattcggtacattagatcaagaaacacttgaaacagcgttagacactttgttaaatcttaaatcaactggtagaatggttgggattatttcacatgtgagcgaattgaaaaatagaatacctttagttttagaagtgaaatcagatcaatatcagagttcaacaagattcaaaagaaattaaaacataaaaaatagagatggtactttggaatgtatagaacaaccttagcccatctctttttatttaaaaattattttttctcacgtaataaatctctgatttcagttaataacacaacattttcttccacaactgcttcttcttcggcttcttctttcttcattaatgtatttgcaatcttaacaaagatgaataaagcaaacgcgatgataataaagtcgataacagattggataaataaaccgtatttaataccccagaatgaccattctttagcaaaatcaactgatccgaaaattttaccaattaatggcatgatgatattttctactaatgaagatataatcttgttgaaagctgcacccatcacaacagcaattgctaaatctaagacgttaccttttaaggcgaactctttgaattcttttaacattacactcaacctctcttttttaaatgtaacctcaattatacaacaaataaaaaaattagaaaatagattattcaagaaaatttgattatcgcaaagacctttgttatcctataaaggtgcgtgagttattgaataaaatgtttagataatatttttattctactacataaaattaaatatagaattgaagggagtaattaattatgaattcttcttcaccagagaatccaaatggaaagaagtattcaccagtcttcatctatagtgcaattgttgttgctatagtcgtattacttggtgcatttttacctgaacaattcaactatgttaccaataatattaaaatgtggattacagaaaagttaggttggtattatcttattcttactacgattatcgtgttcttctgtatattccttatttttagtcctattggaaaacttaaactaggtaaaccaaatgacaaacctgagtttaatacaatttcatggtttgctatgttgtttagtgctggtatggggataggtttggtgttttatggtgcagctgaaccgatggcgcactttgctacgccacctacagcagatcccaaaactactgaagcttatactgaagctctacgttcaacatttttccattggggattccatgcttgggctgtttatggtgttgttgcgttagcgttggcatattcgcaattccgtaaaggtgaaccaggtttattatctagaactttacgtcctcttttaagtgataaagtggaaggacctattgggatttttattgacgttttatctgtatttgcgacaatcgttggggtagccgtttcgttaggtatgggtgctctacaaattaatggtggtttacattacttgttcaatgttccaaacaatacgtttgtacaagcgattatcatcattgttgttactatcttatttatagcaagtgcatggtctggattaagtaaaggtattcaatacttaagtaacttgaacattggtttaggtactattttaatggtagctgctttaattgttggaccaactgtccttattttaaatatgttaactagctctacgggtagtttactaaacacattcttgtttaatagttttgatacagctgctttaaatcctcaaaaacgtgaatggatgtcttcatggacactttattactggggttggtggttaagttggagcccattcgttggagtgtttattgcacgagtttcaaaaggacgttcaattagagagttcatttctggtgtcttgctagttccagcaattgttagttttgtatggtttagtgtctttggtgtattaggcatcgagacaggtaagaaacacaaagaaatttttgatatgactcctgaaacacagctatttggagtgtttaatcatgtgccatttggtattgttttatcgttgattgcattattattaattgcatcattctttattacatctgctgactcagcaacatttgtattaggaatgcaaacaacatttggttcattaaatccatctagtatggtaaaagttgtttggggaatttcacaggccttaatagcatttgtacttttattagctggtggcggtaacggcgctgaagctttaaatgcgattcaaagtgctgcaattattagtgcattcccattctcctttgtcgtcatactcatgatggtaagtttctacaaggatgcgaaccaggaacgtaaattcctaggtttaacattgactccgaataaacaccgcttacaagaatatatcaagagtcaacaagaagattatgaatctgacattcttgaaaagcgtcagtcacgtagaaatatagagaaaaaagataactaataaaatttagttaagtattttaataacaagtagtatgtcattctagtagctagaacagatatactacttgtttgtttttgtggaaaattgagtatattcaaaaggataagaacgagaatttcgttatttaactacgaattctcgatttttttatattttaagataggtttatttctcacaacttaatagaaaggggtttgacaaagctaaagtgaggtacgacggtataaacaaaaattaactatacatatttcggtatgtgtatatcaaaagaatcacattgaaaagaaatattaaagtttggcaccataattttctttctgctcaatgaaataatacgtttaaatattgaattaaatcattcgcgaaattgataattattctcaattaataaaaaatacttattacaccttacctgaatgataagttttgcttatatactctgattaaaaagtcaaaacctaaattaagcgttttctaagcatgatgagttgtttatcaataaatataataatacaatttaattaaggcatataaatataaaaatgtatcaagggggatcattaaatggctgcaaattttaaagagcaatcaaaaaaacattttgacttgaatggccaaagttatacttactatgatttaaaagctgtagaagagcaaggtattactaaagtttccaatttaccttattcaattcgtgttttgttagaatctttacttcgtcaagaagatgattttgtaattacagacgatcatattaaagctttaagtcagtttggaaaagatggaaatgaaggcgaggtaccatttaaaccttctcgtgttattttacaagatttcacaggtgtaccagccgtagttgatttagcttctttacgtaaagcaatggatgacgttgggggagatattactaaaattaatccagaagtaccggtggatttagttattgaccactcagttcaagtggatagctatgcaaatccagaggctcttgaacgtaatatgaaattagaatttgaacgtaactatgaacgttatcagtttttaaattgggcaacgaaagcatttgataattacaatgcagttcctcctgcaactggaatagttcaccaagttaacttagaatatttagcaagtgttgtacatgttcgtgatgtagatggtgaaaaaactgcatttccagatacattagttggtactgattcacatacaacaatgataaatggtattggcgtactaggatggggtgttggtggtattgaagctgaagctggaatgcttggacaaccttcttatttcccaattccagaggttattggtgtacgactagtaaattcattaccacaaggcgcaacagcaactgatttagcgttaagagtaactcaagagctacgtaaaaaaggtgttgtcggtaaatttgtagagttctttggtccaggtgtacaacatttaccactagcagaccgtgctacaatcgcaaacatggcaccagagtatggagcaacttgcggattcttcccagttgatgatgaatctcttaaatatatgaagttaactggtagatcagacgaacatatcgtgctagtaaaagaatatttgaaacaaaaccatatgttctttgatgttgaaaaagaagatcctaattatacagatgttatcgaattggatttatcaacagttgaagcatcgctttcaggaccaaaacgtcctcaagatttaattttcttaagtgatatgaaatcatcatttgaaaattctgtaacagctccagcgggcaaccaaggacacggtttagataaaagtgaatttgataagaaagctgaaattaacttcaaagatggatcaaaagctacaatgaaaacaggtgatattgcaatagcagcaattacatcatgtacaaatacatctaacccttatgtaatgttaggtgcaggtttagttgctaaaaaagcagttgaaaaaggcttgaaagttcctgaatacgttaaaacttctctagcaccaggttcaaaagttgttaccggatatttaagagatgctggcttacaaccttatttagatgatttaggcttcaacttggttggttatggatgtacaacttgtatcggtaattcaggtcctttattaccagaaattgaaaaagcgattgctgatgaggacctattagtgacatctgtattatctggtaaccgtaactttgaaggtcgtatccatcctcttgttaaagccaattacctagcttcaccacagttagttgttgcttatgcattagctggaacggttgatattgatttacaaaatgaacctattggtaaaggtaatgacggtgaagatgtatatttgaaagatatttggccatcaattaaagaagtttcagataccgttgatagtgttgtaacacctgaattatttattgaagaatataataatgtatacaataacaatgaattatggaatgagattgatgtaactgatcaacctctatatgactttgatcctaattcaacatacattcaaaatccatcattcttccaaggattatctaaagaaccgggtacgattgttccattaaatggtttacgtgttatgggtaaattcggtgattctgtgacaactgaccacatctctccagcaggtgcaattggtaaagatacgccagctggtaaatatttacaagatcatcaagtgcctattcgtgaatttaattcatatggttcaagacgtggtaatcacgaagtaatggttcgaggtacgtttgctaatatacgtattaaaaaccaattagcgccaggtactgaaggtggttttacaacttattggccaacaaatgaagtaatgcctatctttgatgctgcaatgaaatataaagaagatggtacaggtttagttgtattagctggtaacgattatggtatgggttcatctcgtgactgggcagcaaaaggtacaaacttattaggtgttaaaacggttattgcacaaagttatgaacgtatccatcgttcaaatttagttatgatgggtgtattaccattagagtttaaaaaaggtgaatcagctgattctcttggtctagatggtacagaagaaatttctgttaatattgatgaaaatgttcaaccacatgactacgtcagagttactgctaagaagcaagatggtgatttggtagaatttgacgctatggttcgttttgactcacttgttgaaatggattactatcgtcacggtggaattttacaaatggttttaagaaataaattagcgcaataaaaatagatatcacagtaaaattttaatcggtatttgaggcactttgatagtgctcaaaaatacctctataaactttatgatttaataggtcggttcaaaacctttgtgttcttggccggcctcttcttgtattttatgttagaatgagatataaagttaaactgaaagaaggcttaaaatgatatatagtattacagaaatagaagcgcgttatgctgaaactgataagatgggtgtaatttatcacgggaattatgcaacttggtttgaagttgcgcggttggattatatatcgaagttaggttttagttatgctgatatggaaaaacaaggaatcatttcacctctgactgacctcaatgtcaattataaaaagtctattttttatccagaaaaagttaaagttaaaacttgggttgaaaaatattcgagattacgttcagtgtataaatatgagatttttaatgaaaaaggtgaacttgcaactacaggttccacagaattgatttgcattaaagaagatacttttaagcctatacggttggatcgttatttcccagattggcatgaagcctatagtaaagtgcaaacgctcaataatgaagggagaacagtagagataatggatggtattgattctttataagttactataaatgtttggagaggcaatattaacaattaatctataaaaaatagccaatatgttaacattaatgtaattagcgtgaagataagttaatatatagcaaaaacgaacttgttcatacaacatcagatgtgttaaaccaaagtacaacttgtgaggttcagtacacatcagaatgtgtaaacaagttcgttttattttagttattttgtggaataagaaatttcatcttcgtgatcaactacatttacaataatgtggtcatcttcaaagtaccacaaatctttttccgctacgacaacatttaaatcgtcatattgttgttcatagccaatatcaacatcttcctttggttcaactgtaaaagcaggactaaatccttgcttgagttggaattcgccaccatatcttacaaaaaacacgagcactttattattttcaggtaactcaagttcatttttaaaccaagttactgctgcatcagtaagttctatttgcataacaatgacctcctatatttattacagaatgggagtgggccccaattcatattgtttgtgggatttcttttcgaaattctctgtgttggagcccaccccaacctgcacattattgtaagctgaatttccataagcttctatgttgggacccccgaccagaattgaaaaaacctagttataagcgcatttcattctgtcaactacagctaatataacattgtgtagcctatgacattgatctatgtctcgatctcaaatgttcttgtaaaaaaactaagtatagttgaattttaagttaaaaaaattgtttttgcaaaaataaaataatccatcaactgcaaaaaaatatgcaatgatggactaatgtcaaaaaattgttacatccattttattttaggttcttcgcctctaaaaattcttgcgatattagagcgatgtctaattatcaatatgattgaaactaagaaactaacgactaataaaatatagtcttgaatgataagcgagccaatcacacagcaaattgctgcaacgatacttgctaaagaaacatatttaaaaatcttcaatacaataaagaagataattgcaagtattagtaaaagtatcgggttgactcccaagacgacacctgcactagttgcaaccgctttgccaccttggaattttaaataaacaggataaacgtgtccaagtatagcgaataagccaacaattaaaccatttgtaaaaaaagtactaatagggccatctgcgtgaactggtaaccataaagggaagaaaacagttatgaaccctttgaaaatatctagaaatgttaccaagaatcctgcaggacgacctaatactctaaagctattagtagcgccagtattaccactaccaaattgtctaatatcttttttgaaaaataattttccaattacgaatccacttgggaaagcgccgataagataacttagtagtaacatgacgattatcatcataaatattacacatcctttaatatcttaggactattttatcatattcgtttaaattacggctaaaatttttaaaaacagggattaatatatggaattaagctatgaaagttaattgatacttgcattttacgctgatttatataagaataactattgtatagttttaaaaacgaacgtacgtttgcaggaggcgaaatcattggcaatgaataaacaaaataattattcagatgattcaatacaggttttagaggggttagaagcagttcgtaaaagacctggtatgtatattggatcaactgataaacggggattacatcatctagtatatgaaattgtcgataactccgtcgatgaagtattgaatggttacggtaacgaaatagatgtaacaattaataaagatggtagtatttctatagaagataatggacgtggtatgccaacaggtatacataaatcaggtaaaccgacagtagaagttatctttactgttttacatgcaggaggtaaatttggacaaggcggctataaaacttcaggtggtcttcacggcgttggtgcttcagttgtaaatgcattgagtgaatggcttgaagttgaaatccatcgagatggtaatatatatcatcaaagttttaaaaacggtggttcgccatcttctggtttagtgaaaaaaggtaaaactaagaaaacaggtaccaaagtaacatttaaacctgatgatacaatttttaaagcatctacatcatttaattttgatgttttaagtgaacgactacaagagtctgcgttcttattgaaaaatttaaaaataacgcttaatgatttacgcagtggtaaagagcgtcaagagcattaccattatgaagaaggaatcaaagagtttgttagttatgtcaatgaaggaaaagaagttttgcatgacgtggctacattttcaggtgaagcaaatggtatagaggtagacgtagctttccaatataatgatcaatattcagaaagtattttaagtttcgtaaataatgtacgtactaaagatggtggtacacatgaagttggttttaaaacagcaatgacacgtgtatttaatgattatgcacgtcgtattaatgaacttaaaacaaaagataaaaacttagacggtaatgatattcgtgaaggtttaacagctgttgtgtctgtacgtattccagaagaattactacaatttgaaggacaaacgaaatctaaattgggtacttctgaagcaagaagtgctgttgattcagttgttgcagacaaattgccattctatttagaagaaaaaggacaattgtctaaatcacttgtaaaaaaagcgattaaagcacaacaagcaagggaagctgcacgtaaagctcgtgaagatgctcgttcaggtaagaaaaacaagcgtaaagacactttgctatctggtaaattaacacctgcacaaagtaaaaacactgataaaaatgaattgtatttagtcgaaggtgattctgcgggaggttcagcaaaacttggacgagaccgcaaattccaagcgatattaccattacgtggtaaggtaattaatacagagaaagcacgtctggaagatatttttaaaaatgaagaaattaatacaattatccacacaatcggggcaggcgttggtactgactttaaaattgaagatagtaactataatcgtgtaattattatgactgatgctgatactgatggtgcgcatattcaagtgctattgttaacattcttcttcaaatatatgaaaccgcttgttcaagcaggtcgtgtatttattgctttacctccactttataaattggaaaaaggtaaaggcaaaacaaagagagttgaatacgcttggactgacgaagagcttaataaattacaaaaagaacttggtaaaggcttcacgttacaacgttacaaaggtttgggtgaaatgaaccctgaacaattatgggaaacgacgatgaacccagaaacacgaactttaattcgtgtacaagttgaagatgaagtgcgttcatctaaacgtgtaacaacattaatgggtgacaaagtacaacctagacgtgaatggattgaaaagcatgttgagtttggtatgcaagaggaccaaagtattttagataattctgaagtacaagtgcttgaaaatgatcaatttgatgaggaggaaatctagtgagtgaaataattcaagatttatcacttgaagatgttttaggtgatcgctttggaagatatagtaaatatattattcaagagcgtgcattgccagatgttcgtgatggtttaaaacccgtacaacgtcgtattttatatgcaatgtattcaagtggtaatacacacgataaaaatttccgtaaaagtgcgaaaacagtcggtgatgttattggtcaatatcatccacatggagactcctcagtgtacgaagcaatggtccgtttaagtcaagactggaagttacgacatgtcttaatagaaatgcatggtaataatggtagtatcgataatgatccgccagcggcaatgcgttacactgaagctaagttaagcttactagctgaagagttattacgtgatattaataaagagacagtttctttcattccaaactatgatgatacgacactcgaaccaatggtattgccatcaagatttcctaacttactagtgaatggttctacaggtatatctgcaggttacgcgacagatataccaccacataatttagctgaagtgattcaagcaacacttaaatatattgataatccggatattacagtcaatcaattaatgaaatatattaaaggtcctgattttccaactggtggtattattcaaggtattgatggtattaaaaaagcttatgaatcaggtaaaggtagaattatagttcgttctaaagttgaagaagaaactttacgcaatggacgtaaacagttaattattactgaaattccatatgaagtgaacaaaagtagcttagtaaaacgtatcgatgaattacgtgctgacaaaaaagtcgatggtatcgttgaagtacgtgatgaaactgatagaactggtttacgaatagcaattgaattgaaaaaagatgtgaacagtgaatcaatcaaaaattatctttataaaaactctgatttacagatttcatataatttcaacatggtcgctattagtgatggtcgtccaaaattgatgggtattcgtcaaattatagatagttatttgaatcatcaaattgaggttgttgcaaatagaacgaagtttgaattagataatgctgaaaaacgtatgcacatcgtcgaaggtttgattaaagcgttgtcaattttagataaagtaatcgaattgattcgtagctctaaaaacaagcgtgacgctaaagaaaaccttatcgaagtatacgagttcacagaagaacaggctgaagcaattgtaatgttacagttatatcgtttaacaaacactgacatagttgcgcttgaaggtgaacataaagaacttgaagcattaatcaaacaattacgtcatattcttgataaccatgatgcattattgaatgtcataaaagaagaattgaatgaaattaaaaagaaattcaaatctgaacgactgtctttagttgaagcagaaattgaagaaattaaaattgacaaagaagttatggtgcctagtgaagaagttattttaagtatgacacgtcatggatatattaaacgtacttctattcgtagctttaatgctagcggtgttgaagatattggtttaaaagatggtgacagtttacttaaacatcaagaagtaaatacgcaagataccgtactagtatttacaaataaaggtcgttatctatttataccggttcataaattagcagatattcgttggaaagaattggggcaacatgtatcacaaatagttcctatcgaagaagatgaagtggttattaatgtctttaatgaaaaggactttaatacagatgcattttatgtttttgcgactcaaaatggcatgattaagaaaagtacagtgcctctatttaaaacaacgcgttttaataaacctttaattgctactaaagttaaagaaaatgatgatttgattagtgttatgcgctttgaaaaagatcaattaattaccatcattactaataaaggtatgtcattaacgtataatacaagtgaactatcagataccggattaagggcagctggtgttaaatcaataaatcttaaagctgaagatttcgttgttatgactgaaggtgtttctgaaaatgatactatattgatggccacacaacgcggctcgttaaaacgtattagttttaaaatcttacaagttgctaaaagagcacaacgtggaataactttattaaaagaattaaagaaaaatccacatcgtatagtagctgcacatgtagtgacaggtgaacatagtcaatatacattatattcaaaatcaaacgaagaagatggtttaattaatgatattcataaatctgagcaatatacaaatggctcattcattgtagatacagatgattttggtgaagtaatagacatgtatattagctaaaaactatatgcaatcacgaaattaaatgataaaatacagtaatgttaaattttgactaaattcaagggatttatattaaatgctgaccaagtacttatcgttaaattagcgatatactttgaccaaactaatataaatctcttgtattgtataagaaatgatgacgtatctctatatttactgaagtttcaattcggtctaattttatagaagatgcatgattcatgtagaggatgcgaggggtttattttgaaagatttcgatagtttaattcctggatggtttaaagaatttgtccatgttggtaccgatctaatatggtctcaatatttaattggtctattattgacagctggattcttctttacaattagttctaaattcgtccaattacgaatgttacctgaaatgtttagagctttagtagaacgtccagaaactttagaagatggtaagaagggtatttcgccattccaagcatttgcgattagtgctggttcgagagttggtactggtaatattgctggtgttgcgactgcgattgttttaggcggtccaggtgcagtattttggatgtgggttattgcatttataggtgcagcgagtgcatttatagaagcgactttggctcaggtttataaagtacatgataaagatggtggattccgtggtggtccagcttactatattactaaaggtttaaatcaaaaatggctaggtatcgtatttgcgattttaattacaattacatttgcatttgtatttaacacagtgcaatctaatacaattgcggagtcgttaaatacgcaatataatattagtccagtaatcacaggtattattttagcaatcgtaacagctattattatatttggtggtgtacgtagtattgctacgttatcttcgttaattgtaccgattatggctatcatttacattggtatggttttagtaatattgctatttaatttagatcaaattgttcctatgataggtacgattattaaaagtgcatttggtatcgaacaagtaactggtggcgctgtaggtgctgcggttcttcaaggtatcaaacgtggtttattctctaacgaagctggtatgggttctgcgccgaatgcagcggcaactgctgccgtaccacaccctgttaagcaaggtttaatccaatcattaggtgtgttctttgatacaatgttggtttgtacagcaactgcaatcatgattttactatattcaggattgaaatttggtgaaagtgcaccacaaggtgttgcagttactcaatcagcacttaatgagcatttaggttctgctggaggtattttcttaacaatagcagttacactgtttgcattttcatctgtggtaggtaactactattatggtcaatctaatattgaatttttatctacaaatcgtgtgatattatttatctttagatgtcttgttgtagtacttgtctttatgggagctgttgctaaaacagaaacagtatggaatacagcagacttatttatgggcttaatggcaattgtaaacattatttccattataggactgtccaatgtagcttttgcattaatgaaagattatcaaaagcagaaaaaagaaggcaagaatcctgtctttaaacctgaaaacttagaaattaacttatttggaattagtgcttggggcgctaacaaatataagaactctgataaataaatatttttaatgtaacgattcattttataaaaatcaaataaaccctgaggttttcaaattaaagcgaaaatctcagggttttaaatttgtactcaataatcatctgtatcattacactagttaatctaagatttgattaaatattaacataataagattgagatttatttcctccattggtgtgcaaagactataccattaataagacatattgttagatagatgaatataaatttattttagctttgcacaatttaatagtacgttttagtttgtattgagtattaattcagataatatataaataaatagaattatttgtaaatatgggagtcagatttttttattatagttattccactttgagaggcatcgaaattaaattaagatatatcatataggataggcgtgtaatagaacacaagtatttaaattattatactttcaagttagacatttccgatatataatcttaataatagaaaaataggtgatgataatgggagaatatattgttactaaaacattgaacaacaatgtcgtagtatgtactaataatgatcaagaagttattttaatcggtaaaggtattggttttaacaaaaaagagggaatggcgttaaacgaccaaactattacaatagagaaaatttataaattagagagtgagcaacaaaaagcacattataaaagtttagttgaaatcgctgatgacaatgtattacaagtaattattgattcgttaaattttatttctaatactgcgatgaatgttgattcaaaacaacttgtaatttcattaacggatcatattatatttgcatataaacgcttaaaacaaaatcaagttattagcaatccatttgttatggaaactatgcagttatatagtgatgcatatcatattgctaaacaggtgattgatcagttaaatgcagcattagatgtacattttcctgaagatgagataggatttattgcattacatattgcatctaacacagaagatttatctatgcatgagatgactttgatcaataatgttattaaaaaaggtatagatatcattgaatcagaccttgtgacaactgttgataaggaatcattacaataccaacgttttataagacatgtacaatttttaattcgccgattaagaagaaaagaatatatacatgcacaagatgattttgtgtctatgattaaaaatcactatccgatttgctataacacagcatataaaattttaactatgatacaaaaacaatttgatgttaatatcagtgagtctgaaattatatatttaacattacacattcatcattttgaagaaaggattaatcaatcctaaattaagtgtattacacgggcgtttcgttactgtaaagggtatttgtatggtatcattgatgttagtaattttacataagtggactgtttttatacaacatcttatgaatattttaagtggtggtgaatctataattgaatgaaaatgaaaagaatataagaaagaactttttaaaatttaccgaatcacggtatatgaagtttgttggtgggaatgatttagtcttctcattaatagctctagtattgttgggtattgttatttttattttcgaaaaagtatcatacgtttttgatccttttatcatcgtttttaagacgatagcagcacctatcatcgtctctttaattctattctatttatttaacccaatcgtaaatatgatggagcgttatagaataccaagagttgcaggtatttctattatttatctagctgtagtaggtgttattacgttaattgttaatttattgatacctattattggttcgcaagtagatagtttagttaaaaattcaccgcaatatctagaaaaattaattaattctattgataaaatagcaaataatacgtttttctcttcgtattatagtcaaattaatgattggttaaattctttacctaagaaaataccatctatgttaagtgaatttacagatggctttgggtctaaaattgcaacgtttgcagaaacgattgctaatattggcgttgtgattgtcacaacaccatttgtactattctttatgcttaaagatggacatcacttcaaagaattttcaacgaatattatgccaccgaaattccgaaaagattttcatgatctacttgaaaaaatgagtgttcaagttggttcatacattcaaggacaaattattgtttcattctgtatcggtatactgttgtttatcggttattcggttatcgggttgaaatatagcttagtgttagctagtattgcggcagttacaagtgttgtgccatatttagggcctactatagcgatttcaccagctattgtaatagctgctataacatcgccgtggatgctcttaaaattagcagtagtatggactttagtacaatttgttgaagggcacttcatttcaccaaatatcatgggtaaaacacttaagattcatccacttacaatcattttcattttactgtgtgcaggcaaattgcttggtattgtaggcgttattttaggtattccgggatatgctattttaaaagtattagttactcatttattccaattatttaaacgtcgatacaatcgtttctatggtaatgatgtaggtgaatatgatattaaagaaagtaataaaatagttgaataagtaattaaaaataccaatagactatacgtttgttggtatttttatggtgcttataatgttgggcactcacatttatgattatcagcacatgtttagcttataaatttttacgaaaggttagccctttataaagcacatgtataatgaaacgagtatttgccacttgattagtacctcattatcatgacgaaaataaaaacaagtggtatttttaatatattaagaagcactcataatcagctgttaattaataatatttttcataagtattgattcatcattttctttatgttaaatatgaatcagtatagataaccatattgttctgtttgagatagtaatattttctatttacctcttaatacagatgtcaatatgacaaaagtgttatataaatcaaaggtaaatgatatgctatttttatggtttatatgatatattttgatttataacagaaataattagaattgatgtgaaaaaatgaatcaggaagttaaaaacaaaatattttcaatcttaaaaattacgtttgctacagctttatttatttttgtagtaatcacattgtatcgggagttatctggtattaactttaaagatacgttggttgaatttagtaagattaaccgtatgtccttagttttactatttattggtggtggggcatcgcttgttattctatcaatgtatgatgtgattttatctagagctttaaaaatggatatatccttaggcaaagttttaagagtaagttatatcatcaatgcattgaatgcgattgtaggtttcggtggctttattggtgcaggcgttagagcaatggtttataaaaactatacgcatgataaaaagaaattagttcactttatatccttaatacttatttcaatgttgacaggtttaagcttattatcattgttaattgtattccatgttttcgatgcatctttaattttagataagattacatgggtaagatgggtattatatgtagtgtcatttttcttaccattattcattatttattcaatggttagaccacctgataaaaacaatcgttttgtaggattgtattgtacattagtgtcatgtgtggaatggttagctgctgcagttgtattatacttctgtggtgtcatagttgacgtccatgtctcatttatgtcatttattgcaatatttatcattgctgcattatcaggtttagtcagctttattcctggtggtttcggcgctttcgatttagttgtattactaggatttaaaactttaggtgtccctgaggaaaaagtattattaatgctactactttatcgctttgcgtactatttcgtaccagtgattattgcattaatcctttcatcatttgagtttggtacttcagctaagaaatatattgaaggatctaaatatttcattccggctaaagatgttacgtcatttttaatgtcttatcaaaaggatattattgctaaaattccatcattgtcattagcaattttagtattctttacaagtatgatcttttttgtaaataacttaacgattgtttacgatgctttatatgatggaaatcacttaacgtattatattttattggcaattcatactagtgcttgtttattacttttactgaatgtagttggtatttataagcaaagtagacgtgccatcatctttgctatgatttcaattttattaatcacagtggcgacattcttcacttacgcttcatatattttaataacatggttagctattatttttgttcttcttattgtagctttccgtagagcacgtaggttaaaacgcccagtaagaatgagaaatatagttgcaatgcttttattcagtttatttattttatatgttaaccatatatttattgctggaacgttatatgcattagatatttatacgattgaaatgcatacatctgtattgcgctattatttctggcttacgattttaatcatcgctatcatcataggtatgattgcatggttgtttgattatcaatttagcaaagtacgtatttcttctaaaattgaagattgcgaggagattattaatcagtatggcggtaattatttgagtcacttgatatatagtggtgacaagcagtttttcactaatgaaaataaaacagcatttttaatgtatcgttataaagcaagttcattagtggttcttggcgatccaatcggtgatgaaaatgcctttgatgaattgttagaagcattctataattatgctgagtatttaggctatgatgttatattctatcaagttacagatcaacacatgccgttatatcataatttcggtaaccaatttttcaaattaggtgaagaagcaattattgatttaacacaattttcaacttcaggtaaaaaacgccgtggatttagagcgactttaaacaaattcgatgaacttaatatttcgttcgaaattattgaaccaccgttttcaactgaatttataaatgaacttcaacatgtaagtgatttatggctagataatcgtcaggaaatgcatttctctgttggtcaatttaatgaagaatacttatctaaagcgccaattggtgtaatgcgaaatgaagagaatgaagtaattgcattttgtagtttaatgccaacatactttaatgatgccatttcagtcgatttaattagatggttgccagagttagatttaccattaatggatggtctatacttgcatatgttactttggagtaaagaacaaggttatacaaaatttaatatgggtatggcaacgttatcgaacgttggtcaattgcattattcatatttaagagaacgacttgcaggccgtgtctttgaacatttcaacggtctatatcgtttccaaggattacgtcgttataaatctaaatataatccaaattgggaaccacgctttttagtttatcgtaaagataattcgctttgggaatcactttctaaagtaatgcgtgtaatacgtcacaaataataaaaatccaagtgctaagaggtatacagttttgcctgaagcgcttggatttttttggtttctataaagaatgatttataaaaaacggtacagataagaatatttaagtttcctatctgtaccgtattttaatattgaaatgagcttaagttaagtcgcctaacttttattatcagtccaatcagtttcatcaagtataaatgttattgcttatttttgtattcttggcgtattttttgttcttctgcatagcgctctggatttttcttataaaaatcttggtgatagtcttcggctttgtaaaattgtgacgcgggtaatatttttgttgcaattgccttatcagcattaatcgtatttttaagctgctcgatataagtctcagcgagttctttttgatgatcattagtgtagaaaatagctgtttgatattgaggaccacggtcttgatattgaccccctgtatctaatgggtcaatgactgagaaaaatatttctaataacttattgtatgagaataatgcaacatcatattgaatttcaacagtttctaaatgaccactcgtacctgattttacttgttcgtaagtaggattttcaatatgtccgcccatatatccagaagttactttttctatgccgtcaaaggtgtcaaatggtttcgtcatacaccaaaaacaacctccggcaaaataagctgtattaatattcatttttgacatcctttcattagaccttagtacgatttattaagaaatcacttgctttttgaattgtttttatataacgttaatatgtgattattatagtacacaaaaatctatttttgaagatataaggtaggtaaatatggataaagaaactaatgacaacgaatatagacgtcaaagtgaacatcgcacttcggcgcctaagcgaaaaaagaagaagaaaattaggaaattacctatcattcttctgattgttgtaattttacttatcgcattagttgtatatattgtacatagttacaatagcggtgtagaatatgccaagaaacatgcgaaagatgttaaagtacatcaatttaatggaccagtaaaaaatgatggtaaaatttctattcttgtactcggtgcagataaagcacaaggtggacaatcaagaacagattctatcatggttgttcaatatgactttatcaataaaaagatgaaaatgatgtctgtcatgcgtgatatttatgcagatattccaggatatggaaaacacaaaattaattcagcatacgctttaggtggtccagagctacttagaaaaacacttgataaaaatttaggaattaatcctgaatattatgcagtagttgattttactggatttgagaaaatgattgatgaattaatgccagaaggtgtaccaattaatgtcgaaaaagatatgtcgaaaaatattggtgtatctttgaaaaagggtaaccataggttgaatggtaaagaattacttggttatgcaagattccgtcacgaccctgaaggtgacttcggacgcgtgcgacgtcagcaacaagtgatgcaaacattgaaaaaagaaatggttaatattagaacagttgttaaattaccaaaagttgcaggtattttaagaggctatgtgaatacaaacattcctgattcagggatcttccaaacaggtttgagttttggtatccgaggtgaaaaagatgttaagtcattgactgtgccaatcaagaactcatacgaagatgtcaatacaaatactgatggtagtgcattacagattaataaaaacacaaataaacaagctattaaagactttttagatgaagattaaaaataaacaaggcgatttctatcatactcagatagaagtcgccttgttcgttttcaaagaattatttggcatgcatcctatgaagaattattgatctgactttcttacgccagccacaccataatggtttggtttcatttcttctataacaacgtgaattgcttgtctatttgctcccgttgttttttctacggcgtcagtaacttcgctaactaaattttttaattgttcatccgaacgaccttctaataattttacattgacgattggcatcatccaaacctcctaatcattattaatttgagtatatcatgtaatacttaaaaattcatttgcaaaataacagaacatttgttctgaaatagttgaaatagaacaagtgttcgtatataatagaattcaagtaagggaggaataacagtgtataattatcatttattagaagatagggatgttctatgtattgaccaaaaaagtttttttgcgagtgtttcttgtattgaaaaggggctagatccattagaaacaaagttagctgttgttgcagatactaagcgtcagggttctgtagtattggctgcgacacctaaattaaaagaattaggcatcaagacaggatcgcgattgtttgaaataccacatagaaatgatatttacattatcaatccaagtatgcgtaaatatcttaatgtttcagttgctatttctaagattgcattgcgttatattccacctgaagatttacaccaatatagtattgacgaattttttatggatgttactgatagctatcatagatttagttctacagtacatgcattttgcgaaagacttaaacgtgaaatttatgaagaaacaggcatttattgtactgtgggcattggttctaatatgttattaagtaaaattgctatggatgttgaagcgaagcataatcaaaatggtatagctgaatggcgataccaagatgtaccaacaaaattatggccaattcagcccttgcgggatttttggggtattaatcgtcgaacagaagccaaattgaataaaagaggaatttttactataggagatttagcgaaatatccatataaatttttaaaaaaagagttcggtattttaggtgttgatatgcatctacatgcgaatgggatagatcagagtaaagtacgtgaaaagcataagatcagcaatccatcgatatgcaaaagtcaaatattaatgagagattatcattttgatgaagcaaaagtagtaatgcaagagttaattgaagatgttgctagcagagttcgagcaagaaaaaaagtggcaagaacgatacattttgcctttggctatagtgatgaaggcggtgtacataagcaatatactttgaaagatccaacaaacttagaaaaagatatttataaagtagtaatgcatttcgcagataaattatgtaataaacaagcactatatcgtacgctaagtatatctttgagtcaatttattaatgaggatgagcgacagttaagtctgtttgaagatgaataccaacgcaaacgtgacgaatgtctagctaaaacgatagaccaattacatttgaaatacggcaaaggtattgtgtccaaagcagtatcgtttacagaagcaggtacaaaacacggcagattaggtttaatggctggacataaaatgtaatgactatacggtttaagtaatatataactgtgattcgtataaaataagtctctaaagataaatatttcatatatcacaatagattttcacaataatatctaagaatacatggaatttatcaaaagagacttaataattattggatataacaatcaaaatcactcaatgcttgcataccgcgttctcggtcagtaggatttttgaaactaatttttaaagcaccgtatatatcttcgcgtacttctaagattcttaagttgcttatagatatattatgtaaactcaggatataagtcactttgcttatcatacctgattcatccggaatatctacatatagatcatacgcagtatttagtccacctagttgtttagcgggcagtgcgtcacgatacgatttagcttcggcaaaaaatgataacaatttttcagaatcattgctttctattagtttttctaaatcttgaaactgactttttagttgtccaatcatttctaaaatatacgttttattactcaaggtgatatctttccacatttgtgcattactactagctatacgagtgatatcacgaaaaccaccagctgcaagtttattgactaaatgatgttcttgaccgttcttttgactaacatgaactaaactagatgcaacgatatgaggtaaatgacttacgacgcttgttacgtagtcgtgttcttcagcagtagttataataaatttagcaagagtaggtgataacagttcttttaacgtgtttgctgcttgctcatttcttggctcattgtagactaaaatataataagcgttttcaaataagtgccttttagcatttagtacaccagatttatgactaccagccattggatgaccactgactaaatgaatattatgctttaataaattgcattcgtgttgctgtatcattgctttagtactaccagtatcagaaacaataacaccaggtttagttggcatatctataagctcgctaagatatttatttgtgatagcaacaggtgttgcataaataattacatcggcttttttaatagcttcactataatttaaacatttttcattaataataccgattgatttagctttatctaactgagaagtatctgcatcgtatgcaataatattagtattagggttatggtattttatattgctagcaagacttccaccaattaatccaagcccaacaaataaaactgttgtcatataaatcaccttatttcgaaattttcagaataataacattgtaaatgagctgttgacacagtgcaatagtaaataaaaatcgataatagcattaatagataaacggatataaatcatctacaataaagagtatagtaacacaatggcaacggaggggtaaatcaatggaaccaatattagaaatgattaaaacattaacaggtattaatagtccttcaggagacacagaagaagcaattcaatttgtcgaaaaatatgcaaaagacttgggttatcaaacaacactaacaaataaaggtgcgttattaataacagtgccaggcaaaaatgatgaagtacaacgctgtattactgctcatgttgatactttaggtgcaatggttaaagaaattaaagaagatgggcgcttagcaatagaattaattggaggatttacgtataacgcgattgagggtgagtattgccaaattaaaactgatgctggtcaaatatatacaggaacaatttgtctgcatgaaacaagtgttcatgtatatagaaataatcatgaaatacctagagaccaaaagcatatggaaataagaattgatgaagtaactacatcagaagaagatacaaagagtttaggtatttcagtaggtgattttgttagctttgatccacgtacagttatcacgtcatcaggttttattaaatctcgtcatttagatgataaagctagcgtagcgatgatactacaattactaaagaaattaaaagaagagcaaataatattaccacatacaacgcaattttatatttctaataacgaagaaataggttacggtgcaaatgcatcaattgattcgaaaatcaaagaatatattgcattagatatgggtgcgttgggagacggtcaagcatcggatgaatatacagtttctatttgtgccaaagatgcttcaggtccatatcataagcaattgaaatcacacctagttaatctttgcaaaataaataatattccatataaagtagacatatatccatattatggttcagatgcttcagcagctttacatgctggtgcggatatcagacatggtttatttggggctggcattgaatcatctcatgcaatggaacgaacacatattgattctattaaagcgacagagaaattattatatgcatattgcttatcaccaattgagtaaacaattagtgttgacaaatgtgaacgacctatgtaatataatgaactataaaaataattagaattttctaaagaaatagtagcagatatgaaacgtagcaaatagaaagctaatgggtgatgggaattagcacgccatatcttgtgaattggactttggaaaacaattgaatgagttttgaaagtgaacatgaattatgttaactaaggtggcaccacggtaacgcgtccttacaggtatatgcgttatgtggtgtctttttatttagacaaaatgtagtagttaattaaaggtagcaacagaaagttagtgggtgatgtgaactaacaccgagattaatgaaattgggttttgtctgcaacagaaaaattatatatagtaaagagtgaactatgaatatttcgaatattcggttaatttaggtggtaccacgcgtcagcgtcctttatattgataaggatgctggcgtttttttagaaaggagcgtaaagaatggatgtattctataaaaaaataaaagcaaatgtaacacctgaagttttagcacaacttcattccaagaagatcattttggaaagtacaaatcaacaacaaactaagggtcgctattctatagtgatatttgacatctacggtactttaactttagataacgatgtattatcagtaagcactttaaaagagtcgtatcaaatcactgaaagaccgtatcattatttaacgactaaaataaatgaagactatcataatattcaagataatcaacttaagccattaccgtttatatctggatatgttgggacgtgtagctttgatttagtaagacatgaatttcctaaattgcaatcaatacaattagagaatcacaagcaacacgatgtacggttatatatggttgaacaagtttatgtatttgaccattacaaagatgagttatatatcatcgcgacgaatcaattttcaaattcaacaaaatcagatcttgagaatcgagttaataagtctatcgaagacttaactaaaatccaaccattcatgcctacacaagattttgattttaaaactaaagaaattcaatcaaacatttctgaagaaagatttatcgaaatgattcagtatttcaaagagaaaataacagaaggggatatgttccaagttgtgccatcaagaatttacaaatatgagcatcatgctaatcagcatttaaatcaactttcgtttcaactgtatcaaaatttaaaacgacaaaacccaagtccatatatgtattatcttaatatcgatcaaccatatattgtcggtagttctcccgaaagtttcgtaagtgtcaaagatcaaattgtaacaactaatcctattgcaggtacgattcaacgtggtgagacgacacaaatagataatgagaatatgaaacaactacttaacgatcctaaagaatgtagtgaacatcgtatgcttgttgatttagggcgtaatgatattcatagagtaagtaaaatcggtacctcaaaaattactaaattaatggttattgaaaaatatgaacatgttatgcatatcgtaagtgaagtcactggtaaaataaatcaaaatttatcgccaatgacagttattgcgaatttattaccaacaggtaccgtttcaggtgcaccaaaattacgtgcaatcgaaagaatttatgaacaatatccacataaacgtggcgtttatagtggtggtgttggatacataaattgtaatcataacttagattttgcattagcaattcgaacgatgatgatagatgagcagtatatcaacgtagaagctggttgtggagttgtatatgattctattcctgaaaaagaactgaatgaaacgaaattgaaagctaaaagcttattggaggtgagcccatgatcttagttgtagataattatgattcctttacgtataacctagtggatattgttgctcaacatactgacgtcattgttcaatacccagatgatgatggtgtgttgaatcaatctgttgatgctgtcattatttcaccaggtccagggcatccattagacgatcaacagttaatgaaaatcatatcaacctaccaagataaacccattttaggtatttgtttaggggctcaagcactgacttgttattacggtggagaagtcattaaaggcgacaaggttatgcacggaaaagttgatacacttaaggttatatcgcatcatcaacatctgttatatcaagatgtaccagaacaattttcgattatgagatatcattcattaataagtaaccctgataattttccagaagcgttgaaaattactggacgtaccgaagactgtatacaatcattcgagcataaagaaagaccgcattatggtattcagtaccatcctgaatcatttgctacagactatggtgtcaaaataattacaaattttattaatctattgaagaaaggatgaaaaccatgacattactaacaagaataaaaactgaaactatattacttgaaagtgacattaaagagctaatcgatatacttatttctcctagtattggaactgatattaaatatgaattacttagttcctattcggagcgagaaatccaacaacaagaattaacatatattgtacgtagcttaattaatacaatgtatccacatcagccatgttatgaaggtgctatgtgtgtgtgtggcacaggtggtgacaagtcaaatagtttcaacatttcaacaactgtagcttttgttgtagcaagtgctggtgttaaagtcattaaacatggtaataaaagtattacctcaaattcaggtagtacggatttgttaaatcaaatgaacatacaaacaacaactgttgatgatacacctaaccaattaaatgaaaaagaccttgtattcattggtgcaactgaatcatatccaatcatgaagtatatgcaaccagttagaaaaatgattggaaagcctacaatattaaaccttgtgggtccattaattaatccatatcacttaacgtatcaaatggtaggcgtctttgatcctacaaagttaaagttagttgctaaaacgattaaagatttaggcagaaaacgtgcaatcgttttacatggtgcaaatggtatggatgaagcaacactatctggtgataatttgatatatgaattgactgaagatggagaaatcaaaaattacacattaaatgcgactgattatggtttgaaacatgcgccgaatagcgattttaaaggtggttcacctgaagaaaatttagcaatctcccttaatatcttgaatggtaaagatcagtcaagtcgacgtgatgttgtcttactaaatgcgggtttaagcctttatgttgcagagaaagtggataccatcgcagaaggcatagaacttgcaactacattgattgataatggtaaagcattgaaaaaataccatcaaatgagaggtgaataatatgacgattttagcagaaattgttaaatataaacagtcacttttacaaaatggctattatcaagacaaacttaataccttgaaaagtgtgaatattcagaataaaaaatcttttataaacgcaattgagaaagaaccaaagctagcaattattgcagaaatcaaatcgaagagtcctacagttaatgacttacctgaacgagatttatcgcaacaaatctcagattatgaaaagtatggtgcaaatgccgtgtccattttaactgatgaaaagtactttggtggtagttttgaaagattacaagcattgacaacaaaaacaacattacccgtattatgcaaagattttattatagatccgcttcaaattgatgttgctaaacaagcaggtgcatctatgattttattgatcgttaacatcttatcggataaacaattgaaagatttatataactacgctatatcgcaaaatttagaagtgttagttgaagtacatgatcgccatgaattagaacgtgcctataaggttaatgctaaattgattggtataaataacagggacttaaaacgatttgtcacaaatgtggaacatacaaatactattttagaaaataaaaaaccaaatcattattatatttctgaaagtggtattcacgatgcatctgatgtaagaaaaatcttgcatagtggtatcgatggcttactaataggtgaggcgcttatgcgttgtgacaatctatctgaatttttaccacaactgaaaatgcacaaggtgaagtcatgatgaaattgaaattttgtggctttacatcaatcgaggatgttacagcggccagtcaattacctattgatgcgataggtttcattcattatgaaaaaagtaaaaggcatcaaacaattacccaaataaaaaagttagcgtctgctgttccagaacatattgacaaagtatgtgtcgtggtaaatcctgatttaacaactattgaacacgtattaagcaatacgccaattaacacaatacagttacacggcacagaatctattgattttatacaggaaattaaaaagaagtattcaagcattaagattactaaagctttagctgcagatgaaaacataatccaaaacataaataaatataaaggtttcgtagatttatttattatcgacacaccctcagtgtcgtatggtggtaccggtcaaacatatgactggactattttgaagcacataaaagacataccttacttgatagcaggaggcattaactctgaaaatattcaaacagttaatcaacttaaattatcacatcaaggttatgatctttcatcaggtatagaagtaaatgggcgaaaagatatagaaaaaatgacagcaattgtaaatattgtgaaaggagatagagaaaatgaataaacaaatacaaacagaagcagatgaattaggtttctttggtgaatacggagggcaatatgttccagaaacattaatgccagcaattattgagttgaaaaaagcttataaagaggcaaaagcagacccagagtttcaaagagaactggaatactatttatcagagtatgtaggacgcgcgacgccacttacatatgctgcatcatatactgaaagcctaggtggcgctaaaatatatttgaaacgagaggatctaaatcatacaggcgcacataaaattaataatgcgttaggtcaagcgttgctcgctaaaagaatgggcaagaagaagcttgttgctgaaacaggtgcgggtcaacatggtgtagctagtgctacggttgctgcattatttgatatggaacttgttgtctttatgggaagtgaagatattaaaagacaacaacttaatgtatttagaatggaattacttggtgcaaaggttgtggcagttgaagatggtcaagggactttatcggatgcagttaataaagcattgcaatattgggtaagtcatgtagatgatacacattatttattaggttctgcattaggtccagacccattcccaacaattgttagagattttcagagtgtgattggtaaagaaataaaatcacagatattgaagaaagaaggtcgacttccggatgcaattgtagcatgtatcggtggtggctcaaatgcaatcggtacattttatccatttattaaagacgatgttgcgttatacggtgttgaagccgcaggtcaaggcgaggatactgataaacatgcacttgcaattggcaaaggatcacctggcgtattacatggtactaaaatgtatttaattcaagatgaaggtgggcaagtgcaactagcacattctatttcagcaggacttgattatcctggtattgggccagaacattcttattaccacgacattggtagagtaacttttgaaaatgctagtgatacacaagcaatgaatgctttaatcaactttacaaaacatgaaggtattatacctgcaattgaaagtgcacatgcactgagttatgttgaaagactagtgcctacgatgtcgaaagaagatattattgtagtaactatttctggacgtggcgataaagatatggaaacaattagacaatatatggcagagcgaggtcttgcaaatgactaaattatttataccttatattatgggcaataaagatttgattgaaaatgcaacattgttgagtgaaaatggtgcagatataattgaaattggtgtacctttctctgatccggttgctgatggtccagttatcatggaagaaggtcaacaagcgattaaacaaggcataacgatagattatattttcgagcaattagaaaaacacggtaatcaaattaagtgtcagtatgtattaatgacgtattataatattatttgttattatggagaacaagcgttttttgaaaaatgtagagataccggtgtttacggcttaattattcctgatttaccatttgaattatcgcagcgtttaaaacaacaatttagtcactatggcgtcaaaattatatcgttagttgcgatgactactgatgacaaacgtataaaagatatcgtatcacatgcggaaggctttatttatactgtgacgatgaatgcgacgacaggacaaaacggtgcgtttcacccagaattaaaacaaaaaattgagtcaattaaagcgatagccaatgtgccagttgtcgcaggatttggcataagaacaccacaacatgttgcagatataaaagaggttgcagatggtatcgttattggtagtgaaatagtaaatcaatttaaatctaacacgcgtgaagaaatcattaaatatttacaatctatccagcaaacattgaataattaagtttacttgattttaaaaaaattagtcgaatactgtttgaaaaagtgataaacggtgaattataaaattgaatagaaatgatacaaaagtaatatgagcaaaaccaaacgttcatattactttttttgaaattgtatgcaaaaatctaaatattactataaaagtatacgcaattaaagcgtttatgttttagttttaacattaactattgtatacttatttagattagatttattatttttgacatttgcagaggggaaatagaaaaactgcaaatacggaaattaaattaattaacgagagacaaataggagtaatgataatgaagtttacaaatttaacagctaaagagtttggcgcctttacagatagcatgccatacagtcatttcacgcaaactgttggccactatgagttaaagcttgctgaaggttatgaaacacatttagtgggaataaaaaacaataataacgaggtcattgcagcttgcttacttactgctgtacctgttatgaaagtgttcaagtatttttattcaaatcgcggtccagtgatcgattatgaaaatcaagaactcgtacactttttctttaatgaattatcaaaatatgttaaaaaacatcgttgtctatacctacatatcgatccgtatttaccatatcaatacttgaatcatgatggcgagattacaggtaatgctggtaatgattggttctttgataaaatgagtaacttaggatttgaacatactggattccataaaggatttgatcctgtgctacaaattcgttatcactcagtgttagatttaaaagataaaacagcagatgacatcattaaaaatatggatggacttagaaaaagaaacacgaaaaaagttaaaaagaatggtgttaaagtaagatatttatctgaagaagaactaccaatttttagatcatttatggaagatacgtcagaatcaaaagcttttgctgatcgtgatgacaagttttattacaatcgcttaaaatattacaaagaccgtgtgttagtgcctttagcgtatatcaattttgatgaatatattaaagaactaaatgaagagcgtgatattttaaataaagatttaaataaagcattaaaggatattgaaaaacgtcctgaaaacaaaaaagcgcataacaagcgagataacttacaacaacaacttgatgcaaatgagcaaaagattgaagaaggtaaacgtctacaagaagaacatggtaatgaattacctatctctgctggtttcttctttatcaatccatttgaagttgtttattatgctggtggtacatcaaatgctttccgtcattttgccggaagttatgcagtgcaatgggaaatgattaattatgcattaaatcatggcattgaccgttataatttctatggtgttagtggtaaatttacagaagatgctgaagatgctggtgtagttaaattcaaaaaaggttacaatgctgaaattattgaatatgttggtgactttattaaaccgattaataaacctgtttacgcagcatataccgcacttaaaaaagttaaagacagaattttttaggaagggaattatcaaaacatgaaatttacagagttaactgttaccgaatttgacaactttgtacaaaatccatcattggaaagtcattatttccaagtaaaagaaaatatagttacccgtgagaatgatggctttgaagtagttttattaggtattaaagacgacaataacaaagtaattgcagcaagccttttctctaaaattcctactatgggaagttatgtttactattcgaatcgtggtccagtaatggatttttcagatttaggattagttgattattatttaaaagagttagataaatatttacagcaacatcaatgtttatatgttaaattagatccgtattggttatatcatctatatgataaagatatcgtgccatttgaaggtcgcgagaaaaatgatgccttagtaaacttgtttaaatcgcatggttacgagcatcatggctttacaactgagtatgatacatcgagccaagtacgatggatgggcgtattaaaccttgaaggtaaaacacctgaaacattgaaaaagacatttgatagtcaacgtaaacgtaatattaataaagcgataaactatggtgttaaagtcagattccttgaacgtgatgagttcaatcttttcctagatttatatcgcgaaactgaagagcgtgctggatttgtttcaaaaacagatgattatttttataactttattgacacatatggagataaagtattagtaccattagcatatattgaccttgatgaatatgtgttaaagttgcaacaggaattgaatgacaaagaaaatcgtcgtgatcaaatgatggcgaaagaaaacaaatcagataaacaaatgaagaaaattgcagaattagataagcaaattgatcatgatcagcatgaattattgaatgcaagtgaattgagcaaaacggacggcccaattctaaaccttgcttctggcgtttattttgcaaatgcatatgaagtaaattatttctctgggggttcatcagaaaaatataatcaatttatggggccatacatgatgcattggtttatgattaactattgcttcgataatggttatgatcgttataatttctatggtttatcaggtgattttacggaaaacagtgaagattatggcgtataccgctttaaacgtggatttaatgtacaaatcgaagaattaataggggatttctataaaccaattcataaagtgaaatattggttgttcacaacattggataaattacgtaaaaaattaaagaaatagatgtaaatgatgttagggcttatagttattgatactataggctcttttttatgctttttaataaagcctctaatgatatattaaatgacaagtttaacaagtgattgcaataaatgtaaatatgcattgtacaacctatttataaatgattgagttgagtatacgttttaattcattcaatatgactcaaaacaagtcaaaatgtattatatttttggtgaataaaccttagcataacaatttatgtctgattataaatgtgtgtgtttgcaagtgtgtgatatcaaatgtcatatttgtctaattgtaatttataaaatgcatgagcaatgattgctgtaacaaattctagcaaagtaatcaggttgtatattagaaataaataaaaatgatgatagatatattatcgatacaaagatataatatgcaccaaaacgtaattggtttaataatacataacatgaatgtaaatttagcatactgacataaacactacacaaacatatagttatataagtccccttatggaatttcacattctagtttacataatatatattataggaagttaaatatctgtaacgcaaaaggtaccctacatcataatcaatatctaatatcgtcacataacttacttatgctataatcatggtattatattgtttgagtgatttgatgagatttgtctttgatattgacggtacgctttgttttgacggccgattaattgaccagactattattgatacattgttacaattacaacatgctggtcatgaacttatatttgcatcagcacgtccgattcgtgatttgttgccagttttaccatcagtatttcatcggcacacattaattggcgcaaatggtgctatgatttcacagcaatcaaagatttctgttatcaaaccaattcatacagatacatatcatcatatcttaaaaataattcaaaagtatgagttaaattatattattgatgatgattggaattatgctgcacaacttgacactgagaatgctatttttgagcgtttagatccacataagctggccagttgtattgatgttgcaaatatcgacacgccaatcaagattattttattaaatatagacccggcacaaattacaactatattagacgagctaaataaataccatcaagaattggaaatgattcaccattcaaatgagtataacattgatataacagcgcaaaatattaataaatatactgcattacaatatatatttgatgcagatgttaaatatatagcatttggtaatgaccacaatgatattgtcatgttacaacatgctagtagtggctatattataggaccatcagaagcatacacacacgcaatattgaaacttgataaaatcaaacacatcgataataatgcacaagctatttgcaaagtcttaaaatcatataaataaaaacacccctatcaaatgataatcattatcaatcgataggggctattttaataaaattcgtcctcgaacatttcatcctcttcatctaatccaaataattctgccatttctccatgttcaattaacatgtttaaatatgcatcgcggagttcttcttcactcatatcattaatcatttctttaagagaatcaatccacatatttctgcgtaagtgatagtcttcttcaacttcgtttaacatgattatatgtttatttgctgcttctggactagctgtaaagagtaatgcaatcatatgtttacatatcactcgtcttccatcagcatgaggacaattacatttagattttctaggatgttccatatcaatataacaacgataaactttgttaccactgccttttacttcagcctcatgttgcgtttctgaaaatgattttaagttaatgacgcattccctttgataataattaaagcctctttctatagaacgaatacttgcaatatcaagtaatcccattaatgatactcctttttttttattatttttaaatatagaaaataaaatcgataagtgtctagattaatatacttgatttatctatattttataacaagtctagaattatcgcattcttaaataactaatatgaaaatgcttgcactaattcttttgtataagggtgtctatcaacattaaataattcctctattgtaaaatcatcgactatcatgccatccttaagaacgataattctattgactaagcgttgtaacacggataaatcatgagaaataacaataaaatgatttaagttcgtaatcgtttgcgcttttaatatatttattacattttgttcagctataacatctaaatttgaagttatctcatcacatattaaaacgcgaggctgtactaataacgaacgcatgacattaaatctttgtaattgtccgccgctcacttcgcttggtaatttagtcaataattgcgcgttcaactcaaaagtagataaatgttgtattaataattgatcctgagcagcattatcagttaggcctctgtaataatataacgcttcttttaatgaggtctcaatcgtccaatcagggttaaagctagttaaagggtgttggaaaatcggtaacacagcattgtcacttaagtaaatttctcctttaacaggtttaaataagccaagaaccaatgaagcgagcgtacttttaccacagccactttcgcctaaaataccaacattttctccatcaggtatagtaatattgatatcttgtagcaccatctgctttttattataaccaaaagtcacatgttttaactcaatcatagtaatccctctttaattgtgttctatattttattaggtgttcagtatacggatgcaaatgctcatgcttgaaatgattaatattaccttgttcaatgatttgaccttcttttaaaacattaatgtactgacaatatttcaatacatgacttaagttatgtgtgataataaataatgtttgaccatgttctaatacaatatgctgtaataaatccatcacttgattaccgttcaaagcatccaatgaggcgactagttcgtctgcaataattaatttaggctccaacatgagaacgcttgctatgtatacgcgttcaagttggcccccagaaagttggaaactatatttatttaatatatctttgctttgtaaatcaacccacgacaaagccttgtcaattttggacaaagcctcttctttactacttttataatgcttacgataaatcgcagttaactgtttacctaatttagtatggtcgttaaaactttctgcataattttgagaaatatagccaattgtatgaccataatatttactcaatctactaacattttcgccatcaaattggtacgaatcatacgtgcaggttaaatcaaatggtaaatattcaagtaaggctttagcaatcaaactttttccagcaccgctctctccaatcagggcattaatctgttgactaaaaattttcaaatcaatccctttaataagtgatttctcactagtattctttattgttaaattttgtatatcaatgagactcatcatattcacctcgttgtttcagcaatctatctcttagcgcatcgccggttaaattaaaaattaaaatagttatagcaatgactgaagcaggtgcaatcaacataattggatgagacgaaataaaatcacgaccttgttgcaacatagcgccccactctggtgttggcggttgtgcacctaacccaataaatgatagtgaacttatatatagaatgattttaccgaaatcaacgaccatcaaaacgataatagccggtataattttaggtgttaaatgacatattaatattgttcttgtaggtacatgtaataattgtgccatttttatataaggcttattcatttcgctattaactatacttctagtcaaccttgtgtaattcatccattttattattgtaattgaagtaactaaattccataacgatggttggaaaaagcttgctaaagcaatcatgatgataaattctggaatacttagaccaacatcaataaaccttaacactaatcgttcaatccacccctttttatatccggcaaatagacctagtgtaacacctatgacaacgatagctattaatgttaaaacagtaacaaacaatgttgaacgtgcaccgataataattcgggtaaataaatctctcccataatcatcagtccctaataaatgcaaccaactaataggttcaaaagtttgagataaattgactttggttgcattttcactactgacaaagaattgtagtacaatcatcacaaatataaatgcgccgaatacaaaaaagataaggttattttttgaaaatattttatgcatgaaggtcactactttctgatatcaatggtgtattggctttgttttttggatttcctaattgtaaacgctgcttcggatcaagtaataacgttaataaatcagcaatcgtattaataataacaacgaagaagccgataaataacacgcatccttgtataacaggataatctcgagatttaatactatccattaatagataaccaataccaggtatatcaaataaattttcaattactacagtaccacctattagactaccaagtgaaatccctaataatgggataatcggcaaaattgttggttttagtaaatcatgaattaaaatataacgttcattcatacctcgtaatcttgatgcttgtacgatattactttgcaataacgtcaataaattagagcgcactaaacgaatgatgtatgcacacatacctaaagatagcgtgaatacaggcaatacaaactgacttagtataacgctatctatattcattaaatttgtgacaataaataataaaataataccgataaagaacgttggtaaactaattgatagagttgagatcaatctaattactttgtcagataacttatgaaatcgtttggctgctataatgccgagcggtatagatatgcataacgacactactaatgttgaaaaagatatgagtagtgttatgggtgcatagttgaataatatctgtgttaccggttcttttgattcaaaactttttcctaaattaaaatgtaataaatgattcatccaatgccaccactgtaccaataaagaatcatttaatcccaatttatctttggttgcatttatttgttccgtcgacacttgtgctacatcaagatgtaatattttatcaacaggattgcctggtgataatttcattaaaatgaatgtaagtgtagaaataacaaataaaacaactatcatttgcatcagtctatacaacatagactttattatgaacataatagtccccctccttgtgtaagttactaacactttctttttacatgagaatggcacatgtatatgcaacttacatattaagaaccaacgttcattatagtattatccaaaaagaaattgaagtatatttaattttttaacaaaatcattataaaatataatattttgaatcaagtcaaccatgtaaaatataaaaaagtcaaaacaaaaacaactatagcactgtattccatctctttcgaaataattgttactgcagtgtaacttaaaagtcgatgattttgtgcatatagttgtcgaatattattttttatctttacggcgaagttcagcgccctcatagccgtatttttcaatttgcttttctaatttacgcgcttttctttctttacgccaatttctagtaaaataccataatagaaaactaattaataaactcatgattgctaaaaatgcagcgtatcctaataatggttgatattttatatcttgaaaatttggaataaaaaatgcaagcacacctaatataacaaatgtaattacagcagatacaaaccatttatttaaaactaagcaacagaatattgttaataaaatcattattaatgttgtgatccataaataattaggcatatcgaataatgtcatattcattctccttttatttcattactttccttgtatacattttattataaatttttaaaaacttaaacaatagcagtcagtttcaagcaatattctatctactattagaaaaaacattgttccttgcgacatggaaatcgtaacattatcgtttacgagataaaattatgtataatgaatgtattataccaaaggagtgattatatgtctcaaggtttacctttaagagaagatgttcctgtttcagaaacatgggatttagtagacttatttaaagatgatcaacaatattatgaaagtattgacgctctagtacaacaagccaatcaatttcatcatacatatgcaacaacattaaattcaatcgaacaaattaatactgctttagctgaattagaaaatattttaattgccttagatcgcttaagtaattatgcagaactacgtttaagtgtagatactagtaatattgaggcacaagtattgagcgctaaattatctactacatacggtaaaattgttagccaattatcatttgtagagtcagaaatacttgaattaccagaagaaatacttcaacaattagaagaagcatgtccatatcaacactatattaaacagttaataaaacaaaagccattccaattatctgcgtcggtagaacaagtattagcaactttatcacctacgttaaacagtccttacgatttatacggcacgacaaaaatgctagatattacattcgattcatttgaacatgatggtacaacgtaccctgtcgactatgctacgtttgaaaatgattatgaagataataaaaatcctgagtttagacgtaaaagtttcaaatcgtttagcgatgggattcgaaaatatcagcatactaccgcggctacatataatatgcaagtacaacaagaaaaaattgaagctgatttacgtggatttgaatcggtcatcgattatttattacatagtcaagaagtaacgcgtgatatgtttgaccgtcaaatcgatatgattatgcgtgacttggcaccagttatgcagaaatatgctaaacttttacaacgtattcacggattagataacatgcgttttgaagacttgaagatttctgtagaccctgattatgaaccagagatttcaattgaagactcaaaaaattatattttcggtgcgttaagtgttttaggtgatgactatacaaacatgttacgtgaagcatacgatcagcgatggattgattttgcacaaaataaaggtaaagatacaggcgcattttgtgcaagtccatactttacacattcatatgtgttcatttcttggactggtaaaatggctgaagcatttgtcttagcacatgaattaggtcatgcaggtcattttacattagctcaaaaacatcaaccatatcttgaatcagaagcatcaatgtactttgttgaagccccttctacaatgaatgaaatgttgatgaccaattatttatttaacacaagtgataatccaagatttaagcgttgggttattggctcaattttatctagaacatattatcataatatggttacccatttattagaagctgcttatcaacgtgaagtgtatcacaaagtagatcaaggtgaatctttaaatgcgccgacattaaatgaaataatgctaaatgtttataaacaatttttcggagatgcagtagacatgactgagggtgctgaattaacatggatgcgtcaacctcattactatatgggattatattcgtatacgtattctgctggcttaacaatcggaactgtcgtttctcaaaagattaaaaatgaaggccaaccagctgttgatgcttggttagaaacattgaaaaaaggtggtagtgtatcacctgtcgaacttgcaaacattgccggtgtagacattactacagaacagccacttaaatctacaattcaatatatttctgatttagtggatgaagttgaaaaattaacagatgaaattgagcaagcaaataactaagatgcgagacaatttatagcagaacaatataaaccaagattttcacattactaattgtgagaatcttggtttttttgagggtttatgaataatagaaatatatatatttatcgtaagggattttatagtaataactttaagttattgttcgtaatgtgtacctgttaaataaaaataaacactttcagcgatgttaataatatgatca

SEQ ID NO: 3 - DNA, 2736560 bp, Staphylococcus aureus subsp. aureus 6850 (residues 1,368,281-2,736,560 of 2,736,560)
ccaatacgttctaaatgtcttgctgctaaatgagcttgtgcagcgacaaatggatcgttatcaataagatacgttgcgttaataatatgactgtataagtcatcgatatcttcatctcgctcaattatttctcttattaatacggtatctttctttttaaatgcttgatctaaatcctttaacattaacatagctagtttacccattgtctttaaacgggttaacacataatcatctgtaatctttgtacgcaatcgaatattggcaatactcgatgcattatctcctattctttctaaatcggaggcgatttttaatgaagaaatcatcatacgcaaatcactcgcaataggctgttgctttgtaattaacatgataactcgctcattaatatcataatttaattgattgatatgtttatcgtttttaactgtttgtcgtgcaaagcctctatcgtcaatacttaatgattttataccattttcaatactcacatagacatttgcacctaaccgacgtaattcttttattaaatcatcaagttgctcctgatatcgttgtctaattattgccattatatatcaaccaaaccttcctgaaatataatcttctgttttcttgtttgatgggttagagaaaattttatcagtgtcatcatattcattgacataaccatttaagaaaaaggcagttttatctgatactcgagctgcttgttgcatattatgtgtaaccataataattgtatacttttcttttagttcttgaaccaactcttctactcttaatgttgagattggatctaatgctgatgtcggttcatccattaaaatgacttcaggttcaattgctaaacaacgcgcgatacaaacacgctgttgttgcccaccggataaactatatgcatttgtgtgcaacctatcctttaattcatcccaaattgcagcgccacgtaatgatttctcaacgatttcatcaagaacttttttatttttaataccgtgaatctttggaccgtaagtaatattatcgtatattgattttggaaatggattaggttgttgaaagaccatgcccacatttgtacgtaattgttctttagaatatttttgatcaaaaatgtcttgatcgcgatataatattttaccagctgttttgactgtgggtactaactcaaccattcgattcaaagttttaatatatgttgatttgccacaaccagatggacctataatggcagtaatttggttttcataaatatctaaattaatattttgcaatgcatgattttcgccataccataagtctaaattttgtgttgaatatataacagaatgtgagtttgtatcatttcgtgttttatgatgactttgtgagacatcaaacgtatgactttgagaaatttgtttagtttgtgcaagtgtttgcgccatatttaaaactccctttttaatagataaatgagattgattgtttaaattagaattttttactaaatttgttacgtaaaataatcgcaacgccattcattaagattaagataactagtaaaacgataatgcctgccgatgcaacattctggaattcttcttgaggcattttcgcccaagtaaatatttggataggtaatgctgaaaattgatccaatatacttctaggtgttgccaataatatagtcggtatacctataagcacaagtggtgctgtttctcccagtgctcttgaaagagacaaaatgaatccagttaaaataccaggtaacgctgctggtaagacaatacgtcttatcgtttgccatttattagcacctaagccgtaagaagcttcgcgtactgagttaggtacagctctaattgcttcctgacttgaaacaataataattggtaatatcagtaaggtcattgttagcgctgctgccaatatactgttacccattttcaaggcttcaatccctgcaccaccaacgaacaaagtgtaacctaataacccaaatacaactgatggtacaccagctaaattggaaatactgattttaacaaactgagtaaatttgttgtttttcgcatattcttctaagtatatagctgtacctattcctaggatgattgataatggaatgatacttaacattaaccaaagtgaaccgattaacgcgcctttaacgccagccatggatggtgttgaagaagaaaagttagtgaaaaactgtaaatttaaatgacttatccctttaatcaatgtttgagttaacaacgcaataagtacgacaagccctaataatgtacatgctaaaaatatgagtttgaacactttatttttaaccgttctggatgataaatgtttttggacaagttgttgatcgacgagtgattgtctattattatctgtcgtttccatattaatactcctccctaaaacgcttagaaatccattgagaaagtaaattcatgattaaggtaaagataaataatgtgaatcctacagcataaatactgtaataaatatttgatccaaatgttgcatcacctgtcgctatctcaacaatatatccagtcattgtttgaatcgaacttgttaaacttaatgaagctgttggcgaactacctgccgctaatgatacaatcatcgtttctccaattgctcttgaaatcgcgagaacgattgaagctacaatacctgatgttgctgcaggaagtacgactttagttgctacttctaatttagttgctccaagtccataggcaccttctcgaattttatttggtacagatgccattgcatcctcactcaaacttgtgatgagagggacaatcataataccgacaactaagccgggacttatagcattaaactctccaagacctggtatgaaagatcttaatactggtgtaacaaaggtcaatgcaaagaaaccaaacacaattgttggtattcctgctaaaatttctaatatcggtttaattatgcgtcgtgcacggtcacttgcatattcacttaaataaattgctgcaccaagcccgacaggaactgcaaatatagtcgcaataactgtgatttttaaagtccctattatcaatgcccagattccaaacttagggtctgaaccggtaggattccaagtagtagaaaatagaaattcagttattggaattctggtgaaaaaagtgatggtttctaaaagcaatgtgattaatatacctagtgttgttaaaatggaaatcgctgaaattgcggctaaaataactggtataattttgtcattatgcttcccttttttattattatttttttcaattaaagctttaacattagtagatgaagtcataatcaaacctctttctattactcccaaaataattagatttgtaaaataatgatgaaccactattttaagttgataagcttgtagactaactgaatgtcaaaatcagcgtctcgataaatcaagctttatactctaaataatgattcaccatcaaaatcatgtttcaagacacatttgaaattgcgtcttattattttttgtcttcagactttttatcatcggatttcttgtcgtctgatttttgatttttatcaataaatgcttttaaatcatctagttgtgatttgtatgttttctctggtgctgctacatatccagcttcttcagctgctttacctttatcttctaagacgaatttgataaattctgacattactttattatctttcaatgctttttcatttacataaatgaataatggtctacttaatgcataagagttatcttgaattgtttttttcgtaggctctgttgctttaccattttcatctttgattttaacttcttttaatttatctttattttgaacgtagaagttatatccaaagtatccgattccctctttgtttttcgttacagaagaaacgatagcatttgtatcagcatttttttctgctttaatatcttctttattcatcacttcattttcgaagaagtcataagtaccatgacttgagtttggtgatacagcatttatttttttatctggccatttactattaacatctttccatgttttagcttttccagaataaattgcttttaattgctgtttgtctaattcatctacaaaatcattttctttatttacagcaactgttacaccatcttgcgcaattttgaattctttgtatttgatattcttatcttgtaatttttgcttctcttcatctttaattggtctagaagcatcagcgaagtcgatatcacctgcaatgaatttttggaaaccagcacctgtaccagcttgtcctgctgagattttagcatcagagtgatcttgagcccatttttcatttaatttctccacaattggtgctactgttgatgagccatcacctttagcttccccttttaaatcactattaccactgccaccattaccgccaccacaagcacctaataatagtgttgcacctaaagctgtagtaccaacaaattgccattttttcattgaaatatcctccctgtatgaacaacaaatagtatttgtattgattacatctttatcttaaccttgaattattaacctcatttttagaaactgtaaatgttacataaatgtttgttaagaaaatgtaaatattattttttgttaatctaaaaaatattgcttcattagtaaaattaaaatgctcctgaaaaattatcgaaatttaaatatgaacacaaaaaaatggacagatgaaattcaaaaactacttcatctgtccgatttaatattgaatataaaaaacacgcatcctacgatacgtgtaaaaatgattattcttttgagtcaattcgactccaaccttttttagttaaagtgattttaccagtttctatattaataatcttctgtttatataagtgaccgattgcacgtttgaatgaacctttactcatattgaatacttcttttatcgcttcagggcttgatttgtcccagaatggtaattcaccatcatattcaactagtaaatcaaagatgacttgaccgtcatcgtctaaacgttcatgtgcaagtggtaaaaatgaaccatttaactcccctttatcattatgcccgataattctaacttgaacagattcacctagtctcggttcagctttacgttctgattcatgtacgaatattttgtaacctgtttcacttaataagaagctaccaattcgtaatacgcggtaaggtttggcttcaatgacttcgttttttaaattatcgtcgtgtacaggtgtaaacatattttctacaacagattcactcgctaaacgtccatacatatgattctcacggtcaattcgcaatgtaactagcaaatgatcacctggttgtggccatagtgatttcacttttggtaaatcttcccatggtactaacacttcacggggtaatccaacatctatacgtgccccatcgcgatccgttttaagtactttagcaaaatcatatttatctttcgtaatatcaggcatattttgagttgcaaataattcacctgaacggtttggataaatgaagaaactatattcttcacctacttctaattcatcatcatcgttcatttctgattggtttaactttacgttttcaccgtttggtccttttaaaaggtaagttgagccttgtaaccctaatacttcaaggaattctatagaacctactatatctttgtctaatgccatgttattctccttcgattcttgtattctttattattataacatgtgtgagtcattctatcattacaacttatatgaggtcgaaactgtgacgataatatgatataattcttccgttagaatatcgaatgaaaaaaaggagaaaatgcatgttacaagtaactgatgtgagtttacgttttggagatcgtaaactatttgaagatgtaaatattaaatttacagaaggtaattgttatggattaattggtgcgaatggtgcaggtaaatcaacattcttaaaaatattatctggtgaattagattctcaaacaggacatgtttcattaggtaaaaatgaacgtctagctgttttaaaacaggaccactatgcttatgaagatgaacgcgtgcttgatgttgtaattaaaggtcacgaacgtctttatgaggttatgaaagaaaaagatgaaatctatatgaagccagatttcagtgatgaagatggtatccgtgctgctgaacttgaaggtgaatttgcagaaatgaatggttggaatgctgaagctgatgcagctaaccttttatccggtttaggtatcgatccaactttacacgataaaaaaatggctgaattagaaaacaaccaaaaaattaaagtattattagcgcaaagtttattcggtgaaccagacgtactattactggatgagcctactaacggtctggatattccagcaatcagttggttagaagatttcttaattaactttgataatactgttatcgtagtatcacatgaccgtcatttcttaaataatgtatgtactcatatcgctgatttagactttggtaaaattaaagtttatgttggtaactatgatttttggtatcaatctagtcagttagctcaaaagatggctcaagaacaaaacaagaaaaaagaagaaaaaatgaaagagttacaggactttattgctcgtttctcagctaacgcttctaaatctaaacaagcaacaagtcgtaaaaaacaacttgagaaaattgaattagatgatattcaaccatcatcaaggagatatcctttcgttaaattcacgcctgagcgtgagattggtaacgacttattaatcgttcaaaatctttctaaaacaattgacggcgaaaaagtattagataatgtatcattcacaatgaatccaaatgataaagcgattttaattggagatagtgaaattgcaaaaacaacattacttaaaatattagctggcgaaatggaaccagacgaaggttcatttaaatggggtgttactacatcattaagttacttccctaaagataactcagagttctttgagggtgtaaatatgaatctcgttgattggttaagacaatatgctcctgaagatgaacaaacagaaacatttttacgtggtttcttaggtcgtatgttatttagtggtgaagaagttaagaaaaaagctagtgtgctttcaggtggagaaaaagtacgttgtatgctaagtaaaatgatgttatcaagtgcgaatgtacttttacttgacgaacctactaaccacttagacttagaaagtattactgctgtcaatgatggtcttaaatcatttaaaggttctatcatctttacttcttatgacttcgaatttatcaacacgattgcaaaccgtgttatcgatttaaataaacaaggcggcgtttcaaaagaaattccatatgaagaatacttgcaagaaatcggcgttttaaaataaatataatatgtagaatttcttttcgaaaatctctgtgttgaggcccggccaacttgcacatttttgtaagttgacttactgtcaccttctatattgggacttattccccaactcgtattgtttgtagaaattaggaatccaatttctctatgcgtgccgccgacaagggttgaaaaaatctagctacaaagtcattttcattcagtcaactactgtcaatataacattgcagggtctagggcattgattcatgtccgagactatattcaatttaatagacattaactgggcgtctcgatgctaatatttatagcatcgaggtgtcctttttattttattttttaacacatcagcccagtgaacaccccttctctaaattacaaatacagttatcaacgcattaaaagagtacatttatttaatgtgcatattgagtatgctataagtattttggattttatttttcaaaaagtctcattatcaccaccttttctaatataagcaacgctataactttaattttcaggttattccaaaaaatctaaattatcggtttacattcatatttgtcatatgtataatgaacacataccaatttaataatattttgatgaggcgcatcaatcatgagtaaagtttagattactgtctgctaacagctaaatttgaaagggtgcgatgccgaagcgattataatagcagttataatttgttggactttttggttaagagctgagagtttgtcattatttaaaaataatggagtgcatcacttgtatatagattaagagcaagttcgcattccgaacttgttctttttttattattgtgtgcccttcctaacaattaggaggattatatggtaacaagaagtgtgttgaaatttggcggatcatccgtcagtgattttacaaaaataaaaaggatcgctgaaatgttaaaggagcgggtcaatcaagatgaacaattaattgtggttgtaagtgctatgggtaatacaacagatcaattaatgacgaatgtatcgacattgactaaaacaccaaaacaacaagaactggcattattattgacaaccggagagcaacaaactgtatcttatttatcaatggtattaaatgatatcggtgtgaatgccaaagcaatgactggctatcaagcgggtattaaaaccattggccatcatttaaaaagtaaaattgctcaaattaatcctcaaacatttgaacaagcctttcaagaaaacgatattttagtagttgctggatttcaaggcatcaatgaacatcaggaattaacaactttaggcagaggtggttctgatacgaccgctgtggcacttgctgttagtaatcaaataccttgtgaaatttataccgacgttgatggtgtatatgccactgacccaagacttttaccaaaagctaaacgactagacatcgtctcatatgaagaaatgatggaaatgagcgctttaggtgctggtgtacttgaaacaagaagtgttgaattagctaaaaactataatatccctttatatttaggaaaaactttatcgaacgtgaaaggaacatggattatgtcaaatgaagaaatattagagaaaaaagcagttactggtgtggctttggataaacatatgatgcatgtaacaattagttatcccctacctgacaatcagctacttacacaactatttacggaacttgaagaaggcgctgtaaatgttgatatgatttcacaaatcgtcaacttggatgggctacaactatccttcacaattaaagattgtgattttcatcaaatttctatgattcttgaaacattaaagaatcaatatgaagcattagcttataaaatcaatgagcattatgtcaaaatttcattaattggctcaggtatgcgtgatatgtcaggtgtggcatcaaaagcatttttgacattaattgaaaataatatacctttctaccaaacaacaacatctgaaataagtatttcatacgtcattgatgattttaatgggcaacaagcggtagaaaaactatatgacgcatttaacatttaatggtaaaatgattgttaaaatattctaaaaattggaaattattataaaatggagtgacaagttatgacaaaattagcagttgtgggtgcaacaggattagtaggtacaaaaatgttagagacattaaatcgtaaaaatattcctttcgatgaattagtattattttcatcagcacgttctgcagggcaagaagttgaatttcaaggaaaaacatatacagttcaagaattaactgatgctcgtgcaagtgaacatttcgattatgtattaatgagtgctggtggcggtacaagcgaacactttgccccactctttgaaaaagctggtgcaatcgttatagacaattcaagtcaatggcgtatggcagaagatattgatttaatcgttccggaagtcaatgaacctacatttacaagaggtatcattgccaatccaaactgctctacgattcaatctgttgtacctctaaaagtattacaagatgcctatggattaaaacgagtggcatatacaacatatcaggcggtatcaggttcagggatgaaaggtaaaaaagatttagctgagggcgttaatggtaaagcacctgaagcgtatccacatccaatttataataatgtattaccgcatattgatgtgtttttagaaaatggatatacaaaagaagagcaaaagatgattgatgaaactagaaagattttaaatgtaccagacttaaaagtaacagcaacctgtgcacgtgttcctgttcaagatagtcatagtgttgaaattgatgtaacgctggaaaaagaagcgactgcagaagatattaaagcattatttgatcaagatgaccgcgttgttttagtagacaatccagagaacaatgaatatccaatggcaatcaattctactaataaagatgaagtatttgttggccgtatacgtagagatgattcattagaaaatactttccatgtatggtgtacatcagacaatttattaaaaggtgctgcattaaatgctgtacaagtattggaacaagttatgcgtttaaaaggagcgaattaaaatgacacatttatttgagggtgttggcgttgcacttacaaccccttttacaaataacaaagttaatcttgaagctttgaaagtacacgttaattttttactagaaaataatacccaagcaatcatcgttaatggaactactgctgagagccctactttaacaacagatgaaaaagaactcattctaaaaacagttattgatcttgtagataaacgtgttcctgtcatagctggaactggaactaatgatactgaaaagtcaatccaagcttcaatccaagctaaagccttaggtgctgatgcaattatgttaattacgccctactacaacaaaacgaatcaacgtggtttagtaaaacattttgaagcgattgcagatgctgtgaaattaccagtcgtgctgtacaatgttccttcaagaacgaacatgacaattgaaccagaaactgtagaaatattaagtcaacatccttctattgtagctttaaaagatgctacgaatgattttgagtatttagaagaagtgaaaaagcgaattgatacaaattcatttgcattatatagtggcaatgatgacaacgtcgtcgaatactatcaacgtggcggtaaaggcgttatttctgtaattgctaatgtcattcctaaagaatttcaagcgttatacgatgctcaacaaagcggattagatattcaagatcaatttaaaccaatcggcatactgttatcagctctatcagttgatattaacccaattcctattaaagctttaacaagttatttaggatttggaaactatgaattacgtctgccattgattacactagaagatacagatactaaagtgcttcgtgaagcatataacatatttaaagcgggtgaaaatgagtgaaaatattactaattggctatggcgcaatgaatcaacgcgttgctagattagcagaagaaaaaggccatgaaattgtgggggtaatcgaacctacaccgaaagcaacaacgccatatcaacaataccaacatattgctgatgttaaagatgccgatgttgcaatagatttttcaaatccaaatctgcttttccctttattagatgaagagtttcatttgccattagttgtggcaacaactggcgagaaagaaaaactacttaataagttagatgaattgagtcaaaatatgcctgtatttttcagtgcgaacatgagttatggcgttcatgcactgactaaaattttagcagctgctgttcccctacttgatgatttcgacatcgaattgactgaggcacatcataataaaaaagtagatgcaccaagtggtacgttagaaaaattatatgacgtgattgtatctttgaaagaaaatgtaactcctgtttatgatagacatgaattaaatgaaaaacgccagccacaagatattggtattcattctattcgtggaggtacgattgtcggtgaacatgaagttctatttgccggcactgatgaaacgattcaaatcacgcatcgtgcacaatcaaaagatatttttgcgaatggtgcaatacaagcagcagaacgcttagttaataaaccaaacggcttttatacgtttgacaacctataaacatattaaaggagatcgattattttatggtacaacatttaacagctgaagaaattattcaatatataagtgatgctaaaaagtctacaccaataaaagtatatttaaatggtaattttgaaggcatcacatatccagaaagttttaaagtatttggttcagaacaatctaaagtaatcttttgtgaagcagatgattggaaacctttttacgaagcatatggtagtcaattcgaagatatagaaattgaaatggatcgtcgcaattctgccattccattaaaagacttaacaaatactaatgcacgtattgaaccaggtgcatttattagagaacaagctattattgaagatggtgctgtcgttatgatgggcgcaacaattaatattggcgcagtcgttggcgaaggtacgatgattgatatgaatgctactctcggtggtcgtgctacaactggtaaaaatgtacatgtaggggctggcgcagtattagcaggcgtgattgaaccccctagtgcttcaccagttataatcgaggatgatgtattaatcggtgcaaatgcagttattttagaaggtgtatgtgttggtaaaggtgctattgttgcagctggcgcgattgtgacacaagatgtaccagctggtgcagttgttgctggtacacctgcgaaagtgattaagcaagcttctgaagtacaagatacaaaaaaagagattgtagcagcattaagaaaactgaatgactagtgacgtcaacgtataataatttcaaggttgagatacgattatgtctcaaccttattgtttatcattgaataaacttatgatcacaaatttcgaaatacgttacactatttatatagtaatttaacacaaaggattgataattatgaatgaattagaatttgttacgaaacatcgccgtcatttacatcaacatcctgaattaagtttacatgaatttgagacaactgcttatattaaagcgtttttagatagtttaaatattaaatacgattgcccattggaaactggcgtcattgcatacttagaaggtaatggctcacatacgatagcgtatagagctgatattgatgcgttacctattttagaggaaaatgatgtgccttatcgcagtcaatctgatcatgtgatgcatgcttgtggacatgatggtcatacaactgcattaatgctttttgtacaacgttgcaaagacatgcaagatgcgggtcaattaccgcaaaatgtcgttttcattttccaacctgcagaagaaactggtggcggtgcaaatcgattaataaaagccggtgcctttgataagtatccaattgaagcggtatttggtattcatgttaatccatttgctgatgaaggcattgcagtgataagagatgaagaaattacggccagtgcaacagagtatcgctttttcttaacaggcctgtcaagtcatgttgctgataaagaacaaggtcattcttgtggtgaagcattacaacatgtattaactcaaatatcacaaattcaacaatttcaccttaacggtttgaaacgaaatattgttcatattggtcattttaaagctggtgaagcgattaatactgtaccaagtaatggttatttagaaggtacaattcgtacatatgatattgatgatttaacaatcgttaaaaatcaaatgcaaaagatagcagaaagtgtcaagcttctgtttaatgtagactgtgaagttaaatttgcagaaggttatccccctacaatcaatagtccgaaattacgtactcaaatagaggacgctttaataaaagctgatttaaatgtctatgacaaaccaacgccattcttatttggggaagattttagtttttatggtcaacaactagctccagcttactttgtttttataggaacacgaaatgaagataaaggttttgtaactggtttgcacacatcacatttaaattttgatgaaaaagtgttaataaacgtggctaatttttacgaaaatttattaaataattacaaagaggtgtaatacattgacagcaacatggtctgtaaataagaaaatatttttacaaaatgcaatcacagtcaaaaacaatcagccattaatggcagttgttaaaaataatgcatatcactatgacctagaatttgctgtaactcagtttatccatgcaggtatagatacatttagtacaacatcactacgagaagcaattcaaattagacaacttgctccagatgcaacaatctttttaatgaatgcagtttacgagtttgatttagtccgtgaacatcaaatacacatgactttgccttcgttgacatattactataaccataaaaatgatttagctggtattcatgttcacttagaatttgaaaatttattacatcggtctggatttaaagatttaaacgaaattaaagaagtattgaaagatcaccatcataatcaaaatgcaaaaatgattattagtggtttatggacccattttggatatgctgatgaattcgatgtgtcagattataatattgaacgttcacaatggatggaaattgttgaagcacttttatctgatggttatcagttcgacttaatccatgctcaaaatagtgcgagtttttatcgggaaggacaaatattactaccccaccatacacatgcgcgtgtaggtattgcgttatacggttcaagaccatatagttcactgaatcaacacgatattgttcagtcattgactgtaaaagcacatgttattcaagtgcgcgaagtacaagctggtgattattgcggttatagctttgcctttgaagtgactaaaaacaatacaaaattagctgtagttgatatcggttatggcgatggaattttaagaactcgtgctaaacatgaagcacttatcaatggtaaacgctacacgatacgtgcattaatgatgagtcatatgtttgttgaagtagatgacaatgtacatgcacaagatgaagttattctttataataatgatatccgcatcgatgaatatacctttaaaggtgttggtgcaaattctgaacaattaagtgctatgaatcatgattctttaaaaaaggagtacatttcaaatgactgttaaatataatcaaagtggcgaattaacaatggatggtattagtttaaaaacgattgcgcaaagctttggtacacctaccattgtttatgatgaactgcaaattagagaacagatgcgccgttaccatcgcgcatttaaagatagtggattaaaatacaatatttcatacgcctcaaaggcatttacttgcattcaaatggtcaaacttgtagctgaggaagatttacagttagatgttgtttctgaaggtgaattatatacagctttagaagcaggttttgaaccgagtcgcatccatttccatggtaacaataaaacgaaacatgaaattaggtatgctttagaaaataacatcggctattttgttatagattcattagaagaaattgaattaatagaccgctatgctaatgatacggttcaagttgtattacgagttaatccaggtgttgaagcacatacacacgaatttattcaaactggtcaagaagatagtaagtttggattatcaattcaatatggcttagctaaaaaggcaattgacaaagtccaacaatctaaacacttaaaattaaaaggtgtacattgtcatattggttctcaaattgaaggtacagaagcatttattgaaactgctaaaattgttttacgttggcttaaagagcaaggcattcaagttgaattattaaaccttggtggtggctttggtattaaatatgttgaaggtgacgaaagtttccctatcgaaagtggtattaaagatattacagacgcaataaaatctgaaattaaagttctaggtatagatgcaccagaaataggtattgaaccgggacgatctattgtaggtgaagctggcgttactttatatgaagttggaaccattaaagagattccagagattaataaatatgtttcaatcgatggcggtatgagtgatcatatcagaactgcactttatgacgcaaagtatcaagcattgcttgttaatagaaatgaagaagcagatgacagtgtaactatagctggaaaattatgtgagtctggtgatatcattattaaagacgctaaattaccttcatcagtcaaacgtggagactatcttgctatattatcaactggtgcatatcattactctatggcatccaattacaaccaaatgcaaaagccttctgtgtttttcttaaaagatggcaaagcacgtgaagttataaagcgacaatcgttaagacaactcattattaatgatacaaaataaaaataaataaagtaatccccgaagaacagaaaattatactgtgactcggggaatttttaagattatttaattaagagtttattgcttgttggtttatgaatatggatgaatatttttcattacttcagctacagcaacactgcttgcattagattcatcttcaagcttttcaattatattattataatccttttcattacgattctgactcattttgtatgcagcctctatcttgtgtatcttgactttaaagcctacaatacctttggcctgcattttggtattttcagaaatattgtcccataatactgggtcttcacgatgcctttcatactttaccaatagtcttttcaagtcatctattgtttcttcctcacttaatatacttgattcaccatataaatgaactgcttgataattccatgtaggtacattttctttttcataccacgctgaagaaacgtaagaatgtgcaccttgatatatgattaatacattttgattatcttttaatgtattacattgaggatttgttttagctagatgcccactaatataatagtcgtccccttttttatctaaaactaatggtacatgggtagctataggctttcctcgatccacagttacaatcattccaaaagaattactatgaataaacttttcgatttctttaaaatcatctacttgaaaatactttggcacatgcatatgatctccccctgtgaataacaattcattttaatatattttatcattaaaaaatctaaggataaataagttagagtaatgccatagtatcactcatttataaaataaactatgaaacaaaaataattaggctttaacttttagttttaacttgcttttttaaataatataaaatgataaggattaataacaaatacagtgtaaaaaataaaatttcatcaaatccaaaatctttacttgtaattaatacatcaatatgttctaattccatcatctctgttttaatataactattaaactttggtaaggccattaaatgtacattgtaaatatagtaataaaagtctataaaaagtatgttaaaaaatatgtatgtcttatctaaattagttttaaagaataatattcctgatatcgtaattggaattactagaatcatcatcattgctgctaaaatattaatatttaaaccaattgcagataatacaccgaaaactaataaattagcaactaaactaaggataagatatttcataaaatcacctcgtcgttgtacaccataattatattatataaatataattttctattgcaaacaatgttggtgatataaaaaaagagttctcaatttggttgagaaactcatcgcgttaagtatttgtaataagcatataaaaacaccttacttcttggtaaggtgttagttaaaatcaatgattcaaatctaagaattatagtttaacaacgtttgcagcttgtggaccgcggtcgccttcaactacttcaaactcaacagcttgaccttcttctaatgatttgtaaccatcttggttaattgctgaaaaatgtacgaatacgtcattttctccttcaacttcgataaagccgaatcctttttcagcgttaaaccatttaactgtaccttgtttcataatctgaaacctccaagactaaaattcattcaatatgcttattcgcatattacaaaaaatacatgcaaatttcactcaaatattctttgcaatatggaataatcatctgcttaacttgtattatagtgcagttattaccaaattgcaatacaataataaaaaatattcatttaatcaattattggtagtttataatatacttcattattttgtaaaacaatgaaactataaaatatttgtaaatcctcttcacaatcttcgcaatagttcatggcacaattattataaaatgcataaatattatatttgcctgtgacataattatcgaactgaactttacattgattaatcaattgttgatagtgcttaaacatgtcatcaaaatcttgatattgatatttttcaacaatgttttctggccagtcactgaataaccaccatccctcataatcggctctaattttggtaactgtccacattattaaagaccccttccatacttcaaaaactctatacttatttttatacctttatcctctgaaaatcaagtttgacgacttgaaacaaacaaagtattaactatagtaattattagtttttttaagtaaaactacgtataataatattatgaggtggtaaaaatgagacatatacatttacaagtattcggacgcgttcaaggcgtcggatttagatattttacacaacgcattgcaatgaactataacattgtcggtactgttcaaaatgtagatgactatgtagagatatatgcacaaggggatgacgcagatatagagagatttattcaaggtgtaattgaaggtgcctcaccagcatcaaatgtaacgagccatcaacttgaagagttagaactaaatcaaaaattatcggattttcgatcaatataaaatgctaaataaaggaagatgacagtgagatataatatttctcatatatttggggtgttagtgggaattcctgtagcgtttttaacaagcatattggggatgattgcacttgatgtatcttttttaattgatatgtctattggtattgttggctttttaatgacatacctaccgatacaaaaactcacttcacgcaaatatttaaacgaaattggtttgactagaaaagactatcgctatattcgaaatcagttaaatcatacacaccaaaaacttagaggtattttaaaaacgtatgtcaatataagatcaattaaagattttaggcagattaatgatatataccaaatttcacgttctatttatacgacagttagacagagacctgcatcattttataaagttgaaggctttttttattctcatattgataatgctttaaatttggttgatgcatatacacgtctagcaaaaatgcccaaaaaatcaattaatgaacagcaaaaattagaacaaacacgaattactttggatgaggtcaaacgaacattaatcgctgatttaaagcgtctcaacgaagatgattatgaacgtttagatattgaaatggaattaaataagttacatcaaaagcatcatcaagattgatgtaaaatagcaactattggagagatgattgatgactgaaaataaaagtttcaaagaaagccatccactagatgattttataagcgctaaagaattatcgaatactactattcaaaaagaaaagttaacaattgaacaacaaaaacaggtagacacaatcagtaaacaaattaaccctttagacaatgaaggtttattagcgtttggttctgatttacagaaacaaatgtctcaattttcacatcaaatgttggatgaagtacaaagtaaagatgttggtcctattggtgatactttatcagatctcatgtcaaaactaaagtcagttaatccaaatgagttaaatactgataaaccatctatgttaaaaagaatttttagcagagcaaagtcgtctatcaatgaaatcttttcaagaatgcaatcagttagtgctcaagtcgatcgcataacgattcaactgcagaaacatcaaacacatttaacaagagatattgaattattagatacgctatatgataaaaacaaacaatactttgatgacttatcattgcatatcattgctgcacagcaaaaaaagttgcaattagaaaatgaaaagctaccacaattgcaacagcaagcgcagcaatccactaatcaaatggatattcaacaagttgcagatatgcagcaatttatagatagactagataaacgcatatatgacttacagctttcaagacaaatagcgttgcaaactgcgccacaaattcgtatgattcaaaatgttaatcaagcccttgccgagaagatacaaagttcaattttgacaagtattccactatggaaaaatcaaatggccattgcgcttacattaatgagacaacgtaatgcagttgctgcacagcgagctgtcactgatacaactaatgatttattaacagcaaatgctgaaatgttgaaacaaaatgcgattgaaactgcaacagaaaatgagcgtggcattgttgaccttgatactttgaaacgtacacagcgtaacattattgagacaattgaagaaacattaattattcaacaacacggtcgcgaagaacgacaattagctgaaaaagaattacaacaattagaacaagatttaaagtcacatttagtgaacatcaaaggaccgaataaacaatcataaattacgaattagatataacaaaaaggaagcatcctacgattaaattggagatgcttccttttatattattcgttattcctgttgatatttaattggatcttgttttacaaatatgccgactagatagcctaatatcgttgcaataattgctactgggaaccactctaaagaatacgctcttagaggcaatgattctataaagttaattttcagccaacctaacttactaataacactgaaaatcgacaatataaatacgataataactggaatttgttgtgaaatgcgttttgtcggtatgaatttggcaattaaaattaataacacaacagttattgctactgggtatacaatgcttaataccggaattgacattgagataacagcatttaaaccttggttagcaataatgaaactcattaaaatgaaaactaatacaaatgctttatatgatactttaggtacgattctatggaaatattcagaaactgcaacaataagcccacatgctgtagttagacatgccagcgccacaatgatgcccaataaatattttccgaatgaaccaaatcctgttgaagccattgtcgttaataaatatgtcccaatgtttcgatctttggatttcaattgatctaacgtcatatcacttactggcatatgattaccaatataacctaatgaaatatatatgaaaattaaagcaacggctgcaattaaaccagcagtcaaagtttgtttgaatatttgatttgttttagtaatacctgttagttttactgcattaacaacaatcattgaaaaagcaattgctgcaatggcatccattgttaaatagccttgtgtaaagccttcagcaaaacttgaaaaattagaatgatatagtgcttcattgccctttccagcactattaccgctaaagtctaagtatcccttaataatcatcgctaaaatagtaatcaataataatggtgttaataatgaaccaatacgatcgattaacttagatggatttaaacaaatatacaaaacgactatgaagtagataatcgtaaatatgaataaagcgatactactattgctatgtataattggtgtaattgtcatttcaaaagatgtagatgcagttctaggtattgcgaaaagtggccctatagtcaaataaatgatgattaagaacaatattgaaaatttaggtgaaattttatttaatgcgccaatatatccttctttatcaagtgcacctacaatcacacctaataatggtaaaccaatcccagttagaacaaacgctaaaatggcgggccagaaaaattgaccactatccaatccgagattaggaggaaaaattagattgcctgcgccaaaaaacatagcgaagagcgtaaacccaatgacccatgtatttttattcatagagttactcctttttttaaaacacgaaataatttacaagtaaatattttagcacaaaaaataataaagagtctatatgaaatatgttgtacatagcagaaacaaaacacatgtgttgtttaaatcaaattatgacagaaaataaaattcttcaaatttactttttaaatagtaactgatgacttttattcacaatttcatataaactcatattttaaatttatttataaagatttaagtagtaatttttttaataatggagagagatgtccaggtaaatgcgcaacaccttcaacgaaaatagcatattgaccataaatattatgaattgtttgttcaacatcttcagttattggatcttgactcaaaaatacattaaatacttcaatgccaaatttacgtgacatttctacagcttcatacgtatcaataataccatcttgactataattaaatgcagacggttcgccgtcagaaaatacgattaaaaatcgttgatgttgatttcgacgcattaatcgctcacttgcaactctaatagcaacaccatcacgattatcatcttgaggttcaagtgccataatacgtgggccatctttttcaaaggttgagtaatcatagttaataatttcattaatgatatttggttgtgcatgctcgtctgaatcaaaggcatcctcactgaaagataaaatttcatgtttaatgttcaatgcttttaacgtctcgtggaataacactacacctttcttcgtttcggccattttatcatgcatacttgctgacgcatcaattaacaatgtaaacgtcgcatcaaatgatttacttaaatcttgttttttgtaaaataatttatattgatcgtcgataaaccaattaattaaatccttttgtaatcgcccttttgttaaattaaaacgtgcatctcgttgttctcgttcaatcgttttctttataatttgaattaagtctttgatttcatattgtacgtcttgtttcgattcttgatattctaaaacatattgtggctcaatttcaggaatttgccattttatttctacatttttgttcacaccatcaagttgaaatgcctggctttgaccaacagcatcgccttcttcacgatttagcgtatcgtttgatcctttgccctttttggtcatcatatcagtcatatcgtctgtagcatcgccttcacgtgcttcatcattacccaatgtttcactattttgtccttcgtgaagctccatttctaaataagcgccaccttttgactcactatctgcagatttagagtcagctttttcactttggttatcatcatcttctgaagtatcatcttgcccatcgacttgacttgcatcagttctctttaaatcttcaaactctggactagctaatgtattatatagtgttttaggtaagtaataatattcgtttagcatatcttcttttaaaatatcatctacttgatacataattctttgagccagatacatattatcttcagaattttgattttggaaaaaattaggtaaatataagaacatattaactaaaatatcatctaaatctgaatgtatagatggtatatcaaagaaatcttgacttaaaaatgcatgttctaaatacaaaaataataaatctgtatattgtgttttagtacgatacactttaatttgagattccgtatatgatatccgtgtatctaagcgaagatcaattaatttagcagtacttgggcgctcaactttaatagaatttaatacgcgcatatcttctaataatttaaaaagttgttgataaaatttagggtgtttaaaagttttatcttgtactacttcatttacaatttgtacatccatcatatgataaccgtaagcagctaacataacatctgtttttaaaccagccatttcgatatggcttggtcgatgtgaccaaaaccaactcgtaatcaaaacattttgaacaggattatagtaagggaatttttggattttaacttgtgtttgttcattttttaataagagtcgagctaagtcttgcaacatcattacttgcttggcatctaactgttcgtcgttaaattttatgaaacgatcactcatgttttatccctctttaaaagtttagttctacagcattatatattgcttgttgttcacgttcatcttccaatttatcaataattgtacgtttaattgaacgttcaactggcattacagtgattaaatcacacaagtctaataatgcacggatactagcggcttcttcagaaatttgtccctgcttagacatagtacgtaaatcttcgttaaacttaataatttgttcgatttgtttatcatcttgtaataaactttgctctttaatcacattttttaaaatgtccccatcaatatagtcaacgtgaataacaacaaagcgattttttagtgcttcattcattggcaatgtaccaacataaccttcatttatcgctgctataacgttaaaacctggtacagctttgattacttcaccagtgtatggattcgtaatttgacgacgataatctaagaccccatttaatacaggcaatgtttcaggtttagccatatttatttcatcaatatataaaatatgcccctctttcatagctttaataactggaccatctacaaagacaatttcttgttgtccttccgcatttgttttaattgttttaaagcctaataagctttctgtatctaaatcaacagaacagttgacttgatgcatgggtgtatcaacaacttcacttaatgtttctgccaacttcgttttccctgaacctgttggacctttaagtaaaatatttttatttaaatcgaataatgccttcgcatcattgaaaactgttgaatctgaattcttataatgttttagtgccattttaaaacgttctcctttaaataaattaaaaaactaagacatggaataagttctccaaatgccttagtttactattctattctgatataaaacgcaatgcttagtatgcgaattgtttatattttaccaaatttactaattgaaaatctcatattaggcttcatttcaataattatgcgtttaaacttctttgaaatatgttttatagtaaccgccaattaatcctgaattatctattatttgataatattcttcagtttcgttgataacatcatattgtttgcctacagttaacatgtcagaaactgtaaatttctttgcatctgtattaatgacttctactttcttgattggtgtacgttctttccaagtttcatgtaacataaattttgtcctcactatcgtaaaaaaattatttttgtaaagtgaatataaacgataatccactgttttcagtaattctaattgattcaatatcatcttgctcaagcgtttgatatggtatttccacttcatctaagcgcgatttcgcttgattaaagaaatctgcatctttcgtttcaaactcaacttgatcgactgcaccatattcaggcattgtcatttcggtttctacaggcattaaatgtatttcgccacctagaccacccgttccaattttgaatacttgtacatgatagtcagcattgtcgaagggttggtattctgcaaatacttcaagtccgaatatatttgttaaaatttgacctgtaatatctacatgattcactttaagaatcactggtcctaaaccttgcacttgatgtaacggattgacagcactttcgaaagaaggcattcctaaaccgacgccataattattctcatttgagtaaattgagaaaatatgaccgttattatcttcaaaactaaaatatttattaccatttagctctttagttgttgtaaatggaatttctttactcgataatatttccgcatactcctctaaacctgagtcagttggtgtacgtaatccaataccaacaaagtgagattcttctaattgctcacttggaacttgtataaattgaagtcttgttcctgggcttatatctgcatcgccgaaacgaattgagttttcaagaagttcttcacaatttaatcctaatatgtcaaccatgaaatgttttgtctgttctatatttgttgtacctaatgttatacttctaagtccacacattatagccacctctatctttatctttactattatattataacttattttaatcataaattatagaatatcggtcagttgattttgattatagattaatatgtgaaaaatgtatttctttaaaagaactatttcatttaaataggtaacataatatagttatggttgctattgagtatgtcattaatgagtatcagtatatagcaattgaatatttcgttttttgtaggacatgaaaaacatatatatgtcgtgtccataaagcgaatttacatcatgttcagatgattttaaattaactaaaggcgcttatagaattcataaatttcatcgtttgttattatctaaaatgcattcattagcatattgaaacacgctattctacctatatttctattgtgagtctatttcaatagaaatgatatattttttaagtagtcaaaaataaacccacattttaatacgaatcattataaaaataaagtacagcagtaagatatttcgactagaaaataatcttactgctgtttgttattgatttgatcccgtttttaggaatagtaaactattttgtgttgtggattaagattctaataataagtcttctgggttttcaattaattctttaattgtttttaagaatccaactgcttctttaccatcaataattctatgatcatagcttaatgcaatatacatcattggacgattttcgattgtatcttgatcaatcgcaattggtcttgtaataattgaatgcatgcctaaaattgcagcttgattaccattgataattggcgtactcatcattgatccaaaaataccgccatttgtaatcgtaaatgaaccattaaccatatcatctaagccaagttttttctctcgtgctttaactgctaaattagcaatttctgcttcgatttctgcaaaattctttttatcacaatctcttacgaatggtactaataatccatcatctgtagaaacagctacaccaatatcataatattgtttcgtaatcatgtcgtcgccgtcgatttctgcattaacttctggatactttttcaaagctgctacagaagctttagtaaagaatgacataaatcctaatttagtaccatcatgatctttcataaattggtctttcttacgtttacgcaattccataacatttgtcatgtcaacttcgttaaaagttgttaacatagctgtattattagatacctctaataattttttagcagctgttttctttctgcgtgacattttttcacgaatcactggttttgtaggatattgattgtattttttctcttcttttgcaggtgcttgttgtgttgtttgtgttgatgccggtgcctgttgtttcttatcaatatcttctttacgaacaagatcatttgttttcggacttacttcagcaagattcacaccattttcacgagcatatcgacgcgcagaaggtgtagcattaacacgctgctgattgtcatcagttgtttgattgacttcagctttatctgccgatttatttgttgtttcttcttttttattatttgtttcttcattttgttgtggagtattgtcgttactattttctttagaagcattgccactaccttcgccgatgacagcaattgcttgtccaacttctacagtgtcgccttcacttgcaagttgttcagataatacacctgcttcttcagatacaacttcgacattaactttatcagtttctaattcaagaatagcttcacctttttctacgctatcccctacgtttttcaaccattctgcaatggtaccttctgtaatagattctgctaattctggaactttaacctctggcatgacttatttccccctagttattttttaatgcattttctataattttattttgaacaagtttatgaatttctccatcgccttcagctggagcagccctttgaattctgccatgataacttaaatcatatttatctgcaactagcactttaacatatggataaacatataaccaggcaccttgatttttaggttcttcttgtacccatgacacttcttcaaggtttggcaattgtgctagtaatgcttcaatctcttcctctgggaatggatacaatctttcaatcgcaacgagtaatactgattcgtctggatttttagctaatgcttcttttaaatcaatgaacattttaccagttgctaaaataacttttgtaaccttatccgcttgatatgattctgtcaaaattggctcaaatccaccagaagtaaattcatcaattggttttgcaactgttttatttctcagcaagctttttggcgacataacaactaatggtcgcatttgttcagaatctaaactagccgcttgtgcacgcaataagtggaaataattacttgaactagataagttgacaactgtgcaattattttcagcagctaattgtaaaaacctctctaatcttgctgatgaatgttcaggtccttgaccctcatatgcatgaggtaagaataatgttaatcctgaacgttctccccattttgagcgagaactgaataagaagttgtcaaaaatcatttgtgacatatttgcaaaatcaccatattgtgcttcccaaatattgaagctttttttgttttccacattatagccgtattcaaaaccaactactgctgcttctgaaagcggagaattgtgtatatcaaatgtcgctttttgatcaggaacatgatgtaaaggtgtatatgtttcacctgtttgctcatcatgtaacacggcatgcctatgactgaatgtaccacgttcactatcttgaccagttaagcgaatcggtgtaccatcttgtaaaattgtcgcaaatgcaagttgttctgcttgtgcccaatcaactaaaccatcttccttattaaatggctcatgacgcttctcaagaactttgtttaactttttcaaaatgttaaagccatccggatatgttaacaatgcatcatttatttctttcaagtgatcaaacgtaaatgattgttcgtctgcttgtaacggtaatgcaagatctgcaggcttttccatatctggattatccattttatcagctttattaattttatcatgtgcttgtcttagttccttttggacttgttctataaatgaattcatttcatcttctgaaatgacaccttcattaacaagctttttaccaaacacatattcaacagagtcatgtttgcgaatattctgataaggaactggattagtaattgatggttcatccatttcgttatgtccgaaacgacgataacctactaaatcaataacgacgtctttatgaaactctttcctaaattccattgcaatatcaattgcttcaatagtagcttcaacgtcatcagcattgacatggaatattggcacatcataacctttagccacatctgtagaataagttgttgaacgtgcatcaattggttctgtagtaaatccaattctattgttagtaataatatgcaatgaaccacccgtagaatagcctttcaagtttcctaagttcattgtttcgaagttaattccttgaccaggataagcagcatcgccgtgtataataattggcattgctttatgatgatcagtcgtcggagccccagcacgctgtgtatcatcttgtgctgctcttgtacgcccttcaacaacaggtgcaacaatttccaagtgacttggattgtttgccagtgcaatacgctgcattgtaccgtatgaatcagtagttttaatgccaccaaggtgatatttcacatcaccagtccatccagcagttaactgcaagctaccatcttcaggtaagaatttcattggatctgtatgcataaattctgaaatcatcatttcgtacggtttttctaagacatgcgttaaaacgtttaaacgtccacggtgagccatgcctatttgtatatttttaataccttctttcgcagcaatcgtaatagtacgttgtaacatcggtacaagtgcgtctaccccttcaattgaaaaacgcttagcaccaacgaagtttttatgaagatatttttcaaacccttcaacatacgctaattgtttgaatagtgcccttttttcgttattatttaacgttactttatatggcgtttcaattcttctttttaaccaaccacgttcggtattgttattaatatgtgtatactcaaatgcaattggtcctttgtaacgtttttccattcttaaaattgcttcataagcattatcataaatgtcggcaaagtgatctgaaacaattcctgctgatataccttccaaagtctgttgatctaaatcaaagtcttcaatctctaatttaggtacatgtttccttttcggaggatttacaggataaatatcggctttaagatgcccgtattggcgaatattatcaattaaacgcatgacacgcttaattgtgccgtcgctattttgactacttgtactttttaaagctggtacaattgagtcatcattcttaattgtgctgaataagacttgtaaatcttctggtacagatgatggatcttgtaaaaagtcatcatatagatctaacattagacctaaattcgcaccgaagtttacaggagcctctgaaacttcttttctttcgttagtcattttacaccctccacaaaaatgttgaaacgcttacaatgtaataatatcactatttagttatttgttaaagtagatttacctatttatatgctaaaaagaagaatcaacaaaagcgttgattcttctaggtttatagatgtattttattgtaaattttgggaggtgagttccacagaaatgataaagaaccactgtttatttgttttatagccgttcttatacattagtcatagctaatgtgtacttaaataattgatcctatgactttaattgacgtctcagacatgattaaaatatgattttaaacgttgttcctttgttaatttcacttttaattttaatcgatccaccgtttaattgaatgattttttgcgcaatagataatccgagtccattaccgccttgacttcttgaacgagatttatccactcgataaaagcgatcaaaaatgaaatcttgatcttcctctggaataccaattccattatctgtaatttcaattattttttgcttattttttaaccttgtcttaactttaattttcttattcttcacatcatatttgattgcattatcaataaagattaaaaataattgttcgaattgatgaggtttcattttaatttctagatttttagatgtcagatccgtatcaaattgataatctggatgcaattgttttaatgagtgtattcgcgagcgaatttcatcattaatatgcacggtctgcgcttcagaagaaatgtcatttacatctcctttagtcaattcaagtaattcttcgactaattttatgatacgatccatttcttcaatagaaatatttaacgattcttctaatactgccgggtctttttttccccatcgctgaatcaaatttaaatgaccttgaataatttgtaatggtgttcgtaattcatgtgacgcatcttcaacaaattgtctttgttgattaaatgattcttcaatttggctcatcatctcattaaacgtatttgctaaattatctatttcttcataatttgtatttaattgcaatttattttgaaaaccatctcgtcgaatctcaatcattttatttgataaactgacaagcggtttagttatttgagttgaaaatacataactgattgtggcagttataattgttgcaatcactccaaatgcgagcgcaatgatatacaatgattttacgatattatcataattttctagtgaatgaattaacaagctataccctttgaaatcttgcgttgtgattggttctttaataattaaataatcaatgcctttataacgtttttttattacgcggtcaaaatacctgtgttcataacctggttcaactctcactgtgttatcattcgatgtctcaaataatttattattatgctcatcataaataataatctcttgaaaattacctaaagatgcattcaagtctaatgcagatatatctttaacaggcttagaatgaaataaattattaatatcgcttgagcttcgttctgcatcatcaagctcactattatgcagtgtatctttcaagaaaaagataataattaaacaaaacaaaaatatcgtgacaaacgtaatcatcgtggtaacaataatccagttattgcgcaatttacgttttgtcatcgtatcacatacccaacgccacgaactgtttcaatcattttgtcacgatcgtatggttttaacttgtttcttaaatatcttatataaacatctacgacatttgtttctacttcactattataaccccatacatggtttaaaatttgttcccgttgcataacatggtttttattttcagctagaagatatagtaaatcatactctgtttttgttaattcaatttctgcgccatttaccgtcactttaaaagcattcttatcaattgtaataccattgacatcgataatatctttttgtggctgacgacgtaaaatcgcacgaattcttgctaaaagttcttcaatatcaaatggtttaactatataatcgtctgcaccgtaatcaagcccagcaactttgtcatacgtatcacttttcgctgtaattataatgataggtgtagattgttgttgtctaattttgcgacaaatttctaagccattaattgacggcaacattaaatctaatatgattaaatcatagtaatggctaagcgctttatctaaaccgtcttgtccatcatactctgtgtccacattgtaattttcatgtgtgagttccaattcaagaaatcttgctaggttttgttcatcttctactattaaaatttgcgtcatttgtacacctcatattacgactttttctaataaggtaatatattttaaattttgtatttttctatacaatagttgctttttaaattagtttgtttacgtttaaattttatcacaaatcaataaccatgttttaaaattttcaagctacaatcattaattatttattaactcaaatatttaataatcagttaatggaattttgttatttctgattgcagtacttaaatatagaatactgtaacacaaggtcttaccgcaatatcaattgttgtcgtatactgacttttcactaatgtaaaatgaatagttattatctttattttcacaaaatgaccgtagtttaaacatttgggagtgggacagaaatgataaagagccactaatgatttattatgtagtggttcttacacattagccacagctaatgtgtacttaaaaataagaatacatgagtaaaactcatgcataagaaatactaatttctatagaaaaagtatttctttatcgtcgtcccgccccaacttgcacattattgtaagctggctttccgcagctactatgttggggacccgccaacttgcactttattgtaagctgacttttcgtcagcttctgtgttggggcccctgactagaattgaaaaaagcttgttacaagcgcattttcgttcagtcaactactgccaatataatttcgtagatcatagaacattgatttatttcccagcctgtttgaacttgcaagtaacatttcttaatgtatgaattcaaaaggaatatgtaaacaatataatttttaagcttcatcacttttaaatattctaattctactgagaaatacaaatttttttattttctaaaatagcgtaatcatgcgttttatttactattcttaaaaaatattcaaaaaaagttttagtttctaattgacaatgattctcactaatgtataatagtagttgaaaatgattatcaataccacatagaacatccccccacaacgtttcgttcttgttggattggtcattttcaaatattccccttttatatgcccgtaaaagacaatatacgttataacaacgttttataaaagcagtaaacccttacgacactttaggtttactgcttttgttttttactatttaattgattaatttatttctaagtaataacgttgataaaataatacaaaatacgccaccaataatgccggcaataatatctgttggataatgtacacctagatatacacgtgatatggaaatcaataaaatcatagctgcacataaccctataagaataccttttgaattaccttgatttaatcgatttaatagatagataccacttccaaaatatgcagttgatcccatagcatgaccgctaggaaagctaaatcctgttatatcaattaaacgcagtaatgtaggtctttctctatcgaatatattttttaatgctggattcaaaattccagataatgccattgttaatgcaaaaaataatgcttcaattttgtggcgctttaacatgagatatgccacaagaagtaatgaaatacataacattgcccagacttcacctactttagtagccccaagcatgatagatgtcgtaataaagctctctgatgaatatataaattcataaacttcattatcaatccatttccctagtcttgattcgtggaaaaacgcgataattccaaaaaccaatgtaaaaacgatgagcaaagagatacgtttccattgactcataaagcattaccccccattaattcaatgcgtctttaatcatcttatcaaataaagcttctttcgtataactttgttcatacgatttcatattattgataattcgagttctttcctgttccatttcatttagttcttgtaataaaatttgtgctgttaattgttcttcatcaatcgctttagcataacctttatcagcaaaatgatttgcattgtcaatttggtcgcctcgggattgatctaaacctaatggtactaataacattggtatccgtaatgttaagaactcataaatcgcatttgatcctgctctacttattactgtgtccgtaattgctaataaatctgttaaatcctctttaacaaattcatattgtatatatcctgattttttaacttgatcatcttttaatcctttaccagttaaatgtatcacttgatattgttgtaataatgcatctaagttttcgcgaataatgctatttaattttttacttcctaagcttccacccataacgagtaaaacttttttattttcattaaagcctgttaattgataaccattatgtgcattaccattttttaaatcttctcgaattgttgctccaataaaatcagctttctctttgggtagatagtttagcgtttcttcaaatgttgtatatattttcttggcaaatttaagtgctatcttattcgctaatcctggtgttaagtcagattcatgaataatagttggtatatttaatgatttggctgcaataacaacaggcacagatacaaatccaccttttgaaaataatagatcaggtttttcttttttcaaaactttacgagcatcaagaatacctttcaatactttaaatacatctttggcattttctaaagaaatatatcttcttaatttaccactcgaaataggataatacttaatttctggtagttgtgattcaatcatttctctttcaataccatttttagaaccaatataaagcgcttcataaccttgtgataatgcagttggaattaaacttaaatttactgatacgtgtccaactgttccccctccggtaaatgcgattttcgtcattaatattacctctattcttttaaatttttataatatgcataaaatggttcacctttatcatatggcggatattccattaattgttcaccgaccttatgaaatccaaatttggcaaataaaccttgtgcaggtttgtttaacgcaaaggtgtccgttaaaataacttctgcaccacgtgctttaactacatcaataacataattgaataattctgtagcagctcctttatattctttcgaaccagttaatcgatgaataacaaaggcaccttctctatttactggccagtcaatgtcatcataccattctgcttggtcttggtcgacaacaataaagccataaattttgtcattttcctctaatacatacaaataatctttagcaatatcttcttcaaaatgttctaaaagagggtactgatcgtcccattgctcgttgtcgtgttctttcattaattcttttgcttcttctactagatttaagatttgatctaaatctgacattttacctagacggatcatgtacgtcactccttatatcgttatgttaaacatgtttttcagtacatgttaatcttacacactattaacatgctttaaacctttattatgaatgaaaaatagtaattatcacactatgggatgaaaataaccaataaaagtatcatataccaattaattgattgttaaaactagtgaataatactatttaaaaagtatatgctcatagtatattaaagcatgaattgttaacagcgatgatagaaattgcgttatttacatcatttgtaaatgtctaatttatatcttttagagttagacgtcaataaaaataaacacgcctcctaaattgctatctttgcaaatttaggaagcgtgtcattaacataatattaatacaattttagtagtgtgtatcgcttattttaaaatattaatcaatttatcgagaacatcatcatgtttattagctttttcaactaataactcagtaaatttattattcgtttctttattaaattcaccagttacctctagtttattcgcttgttggaaagctttaacttgattttctaaagcttggtcaaattgcgttgattcattatcaactttataacctaaagctgataatccaattttaatagttttaatatttttatcatcgtctccaactttaaatgttttcgtattaggaatgacatttaaagattgatatttaggtgtgtcaatagtaacgtctggtttaatgcctttaccgtgaatataatgaccatctggcgttaaccatttcatttcagtatattttaacaacgaaccatccttaaactctcttgtagtttgtacgacacctttgccgaatgtttttgacccataaactttagctttattatagtcctttagcgcaccagtaaacacttcagaagcgctagctgaaccttcattcactaagatggatatatccatgtctttcgcttcttttaacgcatcattagaagtttgaattgcttcagtatctttacctttttctagtttaacaacagtttttcctttatcgataaaaatatttgccattttaacagcttcatctagtagtccacctgggttatttcttaaatctaaaacaatctttttcaaaccatctttgtgagctttaagaactgcatctttcaattcacctgatgtatcattctggaatttattaatagtaataattccaaccttaccttttttcttatactcaacacttttaacatgaattttttcacgtttaatcttaacgtctttttcttcactgcctcgttgaacagttaaagttacttcagtgttttctttaccacgaacatctttgacaacttcatctaatgctttacctttaattgattttccatttactttagtaatgacatctttaggacggatgccagcacgttctgctggagaacccttcatagggctagtaaccataatttgatcatttttcttttgcatttctgcaccaatacctacaaaatcacctgaaacaccttcattaaaggatttagtttgttcttttgttaaatattcagaataaggatcttttaattctttgaccatgccatcaattgcagctttactcaacttgtcagagttctgttttttaaaataatcactatttaagattttatacacattttcaattttatttaagtttgcttgatcagttttgtttaaaccacttattttttgatttataaaaatatatgcaacaactgtgatgacagccgttattaggattgtaccaattaaaattgatatgaattgccaacgttttaaatgaacgcgtttcgatgaattagtttgttggtcttgattgcttgttgcaatttcagcgcgttcatcatcggatgaagatttgtgttgcttatcatccattgtatcacttccttattatgtattatgtacttttaaattctgtgtagttaatcatatcaatttatgcaagatagcgcaccatatttcactataattgattaatttttagtcacaacttagtttattttaaattaaaaccaggataacaaattgcatcaccctggttctaactattattattaaaaattatattaaaattttagccattccgtatattcttcatataaatcatcaaatacagacattggcaatgtgaaatcaccatgtgtctcaatataatcagacagtatgttaaaatcatcatcgtgttttgggaaagcaagatcgtcaaatatctcttctgctagacgacctttatcgtcgtgtcgcccacgaactgtcatgacaaattgataaaacgaatagtttttcattagttcattgtcacatcaatcacttttgtttcacctttaatcacagcattttcatcataaatattaattgaagctgcttgatctgtgttagtaataataataggtgaaataacagatttagcattattattaatatattcaaggttgaatcttactaatggatctccgacgttaacttcgtcaccactagacactaacacttcaaatccttcaccgtctaattgaactgtgtctaaaccgatatgaactaataattctaatccgttatctgctttcaaaccaatcgcatgcttagttggaaagacattatcaacacgtcctgctattggagacacaacttctccttcagttggattaataccaaaaccttcgcccatcattttttgtgcgaatacaggatctggaatatcttcaattttcacgtattctccagttaatggtgcataaattgcgatatctttctgaacttctttgccttttccgaataattttttaaacatactttccactcctacttatcaaaatgtgatattaaatcgccataacccaattcttctaatttttcatatggaataaattgaattgcagcggaattgatacagtatcttaagccaccactttctttaggtccatcattaaagacatgtcctaaatgactatttgattcttctgaacgcacttcagttctcaacataccaaaagatttgtcgactaattctataatttcatcgtcatcaagcgctttggaaaagctaggccatccacattcagaatgaaacttttcttcagatgtaaataaaggtttaccagaaatcttatctacataaattcctttagcaaaatgattccaatattcattcataaatggtggttcagtgccattttcttgtgtaacaatatattctatgtctgttagttcacttttatcttttttaagcattttgattcccccaatgtgattctataaacgcttttctacctgaaccacgttgatattggtaataatgtaccgggttctttttataataatcttgatggtagtcttcagctggatagaaatttttatatggtttaataggtgtaatcactggtttcttgaaaataccttgttcatttaattgttgctttttaaactcagcagcctttttctgatgctcatcatgatagaaaatgactggttgatagctttcgcctctatcgaaaaattgcccttgatcatcggttgggtcaaatgttttgaaatatatgtctaatatattttcaaaggaagtaacctctggatcaaacgtaatttgtactgcttcgacatggccggtttgattcgtacatacctgttcataagttggattgtcaacatgaccgccactataaccagatacgactgacttgatgcctggatatgatgtaaatggtttaaccatgcaccagaaacatcctcctgctaatgttgcatattcttttgtcatatgaattacctcctctatctatctatctaattataaatttagtctataaaggattgaaatggaagtaattaacactgaaaagattaaatttacttcttaaggactacgaggccaatcgcaccttgaccagtatgtgcagaaataactggtgtagttacatttatatcgtaattattcatatgaaaagcttcattaaaaactttcttcaatttatcaacatattcaatgacgttagcatgtgcgacaccaacggatttgatttcatgatctcctataaattcagcaatttcctttttcaagtattggatactagaattttgagttctcgcattgtgcacaagctctaagcgaccatcgtctagtgtaccaattggtttaattttcataagattaccaattaaaccttttgttttactaattctgccacctttaattaattgattcaattgccctataactacaaataatttaatgttttctcttaaatgatttaacttattaactatttcagaagttgagacaccttcttttacaagctctactaggtgttgtatttgataccctaaaccaaaagaaatagattttgaatcaataacagttacattagcatctaccatttgacttgcttggtaagcagtgttaaatgtaccacttaatcctgaagaaagatgaatacttatgatttcagcgccatcttttcctagttcttcataagcagatataaattcgcctatggctggttgacttgtctttacatcttcatcattttcaatatgattaataaattcttctgatgtaatatctacttggtcaacgtatgaagctccttcaatagttaaacttaaagggattacatgtatgttgtttgcttctaaatattctttagataaatcggatgttgagtctgtcactataatctgttttgtcatggtcattttcccccttattttttacgaattaaatgtagaaaggtatgtggaattgtatttttttcatctagtttaccttcaactgaagaggcaacttcccagtcttcaaatgtataaggtggaaagaacgtatcaccacggaatttaccttcaataacagtaatatacatgtcgtccactttatcaatcatttcttcaaataatgtttgccctccaaatatgaaaacatggcccggtagttggtaaatatcttcaatagaatgaattacatcaacgccctctacgttgaaacttgtatctgaagtaagtacaacatttcgacgattcggtagtggtttaccaatcgattcaaatgtctttcgacccattactaaagtatgacctgttgataattttttaacatgcttcaaatcatttggtaggtgccaaggtaattgattttcaaaaccaattactcgttgcaagtcatgtgcaactagaatggataaagtcataattatcctccttcttctatcatttcattttttattactaagttatctttaatttaacacaatttttatcataaagtgtgatagaaataatgattttgcataatttatgaaaacgtttaacacaaaaaagtacttttttgcacttgaaaatactatgatgtcattttgatgtctaaatggttagctaactatgcaacgactaaactgctattggagcttttattgctggatgtgattcatagtcaacaatttccaaatcttcataatttatgtcgaaaatagacttgtcactgttaatttttaatgttggaggattgaagctttcacgtgctaattgtgtttgaatcgcatcaatatgatttgaataaatatgtgcatctccaaatgtatgcacaaattctcctacttcaagtccacattctttggcaataaggtgtgtcaataaagcgtagcttgcgatattaaatggcacacctaaaaagatatctgcgctacgttggtataactggcaacttaacttaccatcttggacataaaactggaacatggtatgacaaggcggaagtgccattgtgtcaatttctgttggattccatgcagatacgatgtgtcgtcttgaatccggattatgcttaatttgctcaattactgttttaagttgatcaaaatgattaccatctttatcaacccaatctcgccattgtttaccataaacatttcctaaatcaccgaattgcttcgcaaatgtatcatcttcaagaatacgttgcttaaattgtttcatttgttctttatattgttcgttaaattcaggatcactcaatgcacgatgcccaaaatcagtcatatctggacctttatactcgtctgatttgatataattttcaaaagcccattcgttccaaatattattattatattttaataagtattggatattggtatctcctttaatgaaccataataattcggttgctactaatttaaaagaaactttctttgtcgttaatagtggaaatcctttagataagtcaaagcgaagttgatgaccaaatttcgaaatcgtacctgtatttgtgcgatcatttcgtgtatttcctatttctaaaacttcttcacaaagactgtgatatgctgcatcaaatgaattcaacatatgcgataacacctcattttcattatttatagtatgtaaatttagttcgatataatttaactttatgtagcattttgtgatcaatcattttaggaatgtgatattaatatcatggattccgttactttatttataaaatgctgattaagtacctgccacatcataacgtgatctatgtttccaattgctaattgtttacccaaatctaaaactttaatgctaaaaaattttaaaaaagaggttaacacatgatttgaatattatgtttgatgtcctattaaaacagttaaatttatagaaaatatagttggtaagaacgtactttatataacaaatggaatacaactatattctctattttcaatgacagacaccatttttaatattataaaatgtgttaacctttatatttatttatgtgtactatttacaattttcgtcaaaggcatcctttaagtccattgcaatgtcattaatatctctaccttcgataaattctctaggcataaaataaactaaatcttgacctttgaataaagcatacgaaggactagatggtgcttgctgaatgaattctcgcattgtagcagttgcttctttatcttgcccagcaaaaactgtaactgtatttgtaggtctatgttcattttgtgttgcaactgctactgcagctggtcttgctaatccagctgcacagccgcatgtagagttaataactacaaaagtagtgtcatctgcctttacttggttcatatactctgatactgcttcgcttgtttctaaacttgtaaaaccattttgagttaattcgccacgcatttgttgcgcaatttctttcatataagcatcatatgcattcatatttaattcctccaattaaattgttctgtttgccatttgtttccatactgaaccaagtgcttcatctccgttttcaatacgagatatggccatttcaatttgtaatttaacttcaaacgcattgtcattaatatgagctttaagtgcgggaagctgctctgcattaccttcatcaaagataaacatagcagcacgccacctaacgattttctgtggatcatctaatagtagcaccatttctggtagtgcctctggataccctaaatcgcttatgcaatcccctgctgttcttcttacagcaggacttttatcacgaagccccttatataaatacggtaaaatttctttactttcaatcatacttaataatacaatcgcttgacgtctaaccggtactttttcatcagataaagctaaatcaagcagcggtatatcttcaaaagtcggctttggaaaatggtttaactttcgtaatcgagtcttccaattatcagtcgcatgatattcatccaaagagacatgtcgatagaaatgataattattagttgcgtgattttcttctaaagcatgttttaccaatacgggtaactgtgattctggataagtagctagcacttcttctaggacaccatccattacttcttcaatatttccatagcgatttcctaaatctagccatttacgcataaaaacaatattgtcatgttctgtttgcgcttgcgtcatatgatcaacatatgtttgtggtaattgttctcttaattcttggtcagcagaagttagcttaatttgatacggtatacccttaaaagttaatagttcagctttaatttcaccaaaatgattgtcaatttgaggttcatttacagattctaaaaccttattcgcatcagaaaaagcagctttaatatcaggtaatatgacttcccaatcagcttttggtgccttatcaacagctaagaagttcatgacatgaaaaatggaagtgataccatctatagataacaactgatttataaattctggttgattttcttctacttttttataagtattagataacttgtcttctcttgtatatgacaaaacaactttcattgtatttggacttggcgttggctctatacgtaaaatttccatatactttattccccccgaatactagttgatgaaaaatttattcgaatacagcctctacttttggcaatacagtttcccaatttgcgtcattttctttatctactgaaataaagtccataacatggaaaattgatttaacgccttcaacctttaagatgtcattaataaatgctggctgtgaatcatcaactttagtatacgtatctgatgtcataccttctctgctttcactaagtgtaatcttcattgtgttgtggttcggtgtttctgatatagatataatttgcatttgacttcctcctattgaagttcatttcctaattgttttatttctttccctattgaacactcattgatacaaaaatgatgcgccttcgttttcccctctaatttacgcagacgagttttgattggacattgattgcaataagtattcattaaattatctattttcgcgagtgcattttgctctgaaaaagttaaaatacgcgacacttcctttattacttcaaaatattgcaaccttgtaaataagtgttactgttttaaatttgacataaaaatattataacatttttgaccctaagatttgaatgaaaccttttacaattctatacgtaaaatgtatttatattcaaatgctattgcatcgcaaacgatttttcagtaaaatgagtaagttatttattgagcggtttctaaacacccgcatgatcaaaatttaggaggacattttaatatgtataatgaaattttaggactagttacgtttattgcaacgttcgtgctaatggtacttatgtatcgcttttttggtaaacaaggtttaattgcatgggttgcaattggtacaattattgccaacatacaagtgattaaaactgtagaaatctttggtatttcagcaactttaggtaatgtcatgtttgcttctatttatttagcaacagatatattaaacgatatttatggtcgtagagttgcaaaaagagcagtttggttaggcttttcatcaacattaattatgattattgttatgcaattgtcattacattttattcctgcaccagaagatatggcacaaaaagcattacacgcaatctttgatgttgtgccacgcattgctttaggctcaatcgtcgcatatattattggtcaacatattgatgtatttatcttttcactaataaaaaaagtatttagttctgataaaacgtttttcatccgtgcatatggtagtacatttttaagctcaataattgatacagctttatttgtagctatcgcatttatcggaagtttacctggtacggttgtatttgaaatatttattacaacgtacgtactaaaattagcttcaacagttttcaatgtaccatttggatatattgctaaatcattttatcgtaaaggtaaaattgataagttagatcaaggctattaaagcacttactacacaaaagaataagttttaaggctgatatctgagaaaattttatcaagatgatttttttaggaagtatattacagtactacgtattagaaaatcatctttgaatcagcgagtactttaaacacgtgttacttatttaagtgatgcgtgttttttaatggattacccaacatattttgtattacagtaatagtaactttaactaagtattcgaatagaaagtaggtttattatggcgaaaataaattttgatgctgcgacgaaaggaaatccaggcataagtacatgtgccattgtaatcaaagaagatgaacagcattatacatatacacatgaattaggcgaaatggataaccacactgcagaatgggctgcatgtatttatgcactagaatatgcacgtgaattaaatgtcagcaatgcgctgttgtacactgactctaagttaattgcggatagcattgaagctggttatgtgaaaaacgcaaatttcaaaccttattttgatcaaatagaaatatttgaaaaaagttttgatttattatttgttaaatggataccgagagaacaaaacaaagaagcgaatcaacacgctcaacaggcattgtataaattaattaaaaagaataaataaaaggagcaccgactgatgtgatgtcaatcggtgctcctctatttatcaaagaaacaaattattttttatttttcttagatttctttttcttctttttagctacaacctttttagaagtattttttgatgctgactttttgtctttggattggttatctttttgatttttctttttagccaataataaaggaacgtcctcatctttagattcaatactagttgttgtttcaacatcttcctctttatctttgcgtcgttttgcgattaagagtggtgaatgttcgttatctttcaacactttttcatctgtgttttcatttgtaacttccacatcttcttcatcttctttacgacggcgttttggtaagaagaacggcgtatgtttaactttatcgagtgactcgccattatttagcgaatctttttcttcaacagtaacatcttcttcatcttcttttctgcgacgtttcgcaaataaaagtggtaaatgttttgtatcgtctaaagtctcttttattgaatctttattattatctcttatttctaattcttcctcttcatcttctttacgacgacgtttcgcaatgaagaaccagaaactagctagtaagccagagatacccaccacaccaatagcgtttttaataacattaccgaaattattactaaagtgacgcatatgaagtggatcaatgtcatcatcttcatcaagtttctttttatgtccaatagtcgaactgttaaatggatgatttgcagttccataaccaattgttaaatggctattagattcatttccagtacttgatgattgtttagcacgatcagatgttacaatttgtactgctgaaattcgagcaataccattgttcaatgcagcctcaacttgctgtaatgtatgcgcattattaatatctctaattgtttcaagcacaatttcgttaattcgattcattgctgcttgtttttcatcagctgagccaatttcactatttcgaatactattcattttttcatttgaaaagtctttaattctaccaatagcttcttgcttgcgtttagctagttcttttgctattggattagctgctttcatttgagctttaaattgttccaattgctcagttatttcatcgatgctttgcgcatgttgaatcgcttgaattgcttgttcttttaattgatttaacttagcaatagcttcttgcttctctttatctgttagatcagtacgagctttgatttcatcaatcatgtgttgaattgcatcttcaatcgatttaattgcatttgattttgcttgttcaatcgtaaattgttctggattaaattgttcaatatgcgcttgttcttgttgttgaatttcttcaactgaatgaacatcaggcgcattattaatattatcaattgcttgttgtttaagcttattaacttcggcaattgctgcttctttttgttccagtgttaatgtcacactattattgatttcattaatcttttgttgtgccgcattttcaattgattcaattgcctgttgtttgactactgacaattctttttctacaacttttacaggaacattaacaatcacttttgatccatcaagcaatgtaatttcaacttttgctgataagctatcagaaatcgttgcagttgatggtgtatcgataacttctgctgtaagctgatctattaagttaatgtgtgctaaaacatcttgctctgtaatgatgtcatcacgatgtacgattagttcaccattaacaagcaattgttcaggtgttgcttcagaaatttcatttacagcaggttgatcgtcaacctcccatacatgcgtatttctaatgtcatctaaacctaagtttaatcctcgatttaattgatctatagtttgagcattctcaacgttttgtagtgctcgtttttcagcttcgtcaatttctttgagcgcttttgctttttgctcaggtgttaaatctggatttgaattgatttgatcacgcttcgcattagctatggcttttattttatttttcgcatcttctttagctttcactaaatctttgatgtcttgtaatgcttgtgctaaacgctcttttgcttgctcaatctcttctttagtcatcgcattgttaatgccgttatgaccttgttgaagtatttgattgattcgatctttaagtgcttgtttttccttatctgttagatttggattttgatcgatttcatcaattaatgcttgtacacgtttatcaacatctttattcgcattttctttagctttcactaaatctttgatttcttgtaatgcttgtgcaagttgtgctttggcttgttcaatctcttctttagtcatcgcattgttaatgtcgttatgaccttgttgaagtatttgattaatacgatctttaagtgcttgtttttccttatctgttagatttggatttcgatcaatttcatcaattaatgcttgaacttgtttatcaacatctttattcgcatcaatttttgcttttggtatttcattcgcgtgcacttgttcaatcgcttggttgccagctatttgaacttgagttacagcctgattacttgttgctttattaatgttgttaatgatgttgtttgccagttcttctgctttatttttcgcaataagcttgtcttgatccgtcgcatttgaagcttcgatttcttttagcttattagctaatgcttgattaatcgattgaattgccttgtctttagcatcttgtagtcgttgatcaccattaagattttggattgcatcattgactgcttgaattgcgccattgatatcattcacatttgtgttatcactatttagcaatgtatttgctagacgtttagcatcatcgaagtttgttttagcattatcgtcagcgttttggtaattgacagtttgctctgcatttggaatttcattgtcaactaaatgtttcaatgtttccattgcatcatttaagtcaatttgattattaacaatatctgttacatctgatacagtatcggcattgttaattgcattatgtgcaagatcttgttgctgttgatttaatccatttaacgaattaacaaacgcatttgctttatctttggcatttgcaaggttttggtctccatttaatgcattttgagcatcaataatattttgtttcaattgctctgcttcagcttttgcaattgcattaccttgcactttatctaactcatgtgctgcattcgcaattgcattatcataatttgctttcaaattatcatctgcattgatgtaatttgtgctgctgataacaccaaggtgctgttcgtcaatatattgttgtactgcacccattgcattatctaatttagttgctctattaattgctcgagatgctttatttagcgtttcagcattattaatttgttgggttgccaattgtctttgagcattgtttagatgtgttaattgatctaatctttgtaatgcttcagacttacgattattaagtctttcttcaccatttaatgcttgcttagctgcagtgactgcatcatttaatttgataacttgttctgcagttaagttttgacctgtcgatttatcaagtgcttgtttcgctttatcaaccgcttcatcatacacttgtttgacttgtgtatctgcattgacatagttcgtgctacctttcgtgcgtccttcattgccagtgatttcttgtgacaattgatccattgcacgattaagtgccttagcctcatctacaatttgttggatttgatttaaatcgtttgattgatcgatgcgacctttaaatccatcttgttgagcattgtttaatgcattcaattggtcgatgtcatgtttaccatttgttttagcaagtgctacacgttcatcaccatttaatgcttgttttgcatttaaaatgttttgaagtgcttgatccacttgttgcttattcgaattttgttttaatacattttcagcttctgcaatagcttgtttataagcattttgcttatctgaatctgcttgcgtgtaatctacagtttgctcaacgttagcatgttcattgactgcttgttgcaattgatccatagattgattcaattgcgttgcttgatcaatattttgtttagcagttgcaatttgatcagcatttaaatgtgttaattggtcaatagtttgtttcgcttgtgctttagcttcagcgactctctcattaccatttaactcatttactttttcttgaagcttagttaatgcttgttctacagcgtctttattcgcatttgaaccattagttggatctgtaatgctttctgcagcttgtaacgcttgatctactgcttcttttttatcagttgacgcttcagtgtaatttggttgagccttatctgtattcacttgatcaactttatttttcaatgtttccatcgcgtgatcaagttcagtagcagtatgaacatgttgtgcaacctctgttcttgtaggcgctgcatttatagcatcagttaatgcttgttgttgtgcatgatttaagtttggcaatgcatttacagttgttactgcttgttgttgatcacgagcaagtttttgatcaccatgtaggttatcttttgcagttgttactgcttgtgtcaattgttcaacttgtgatttatcaagtgttggattacctgtttggttaattaaatcttttgcatgctgaaccgctgtttgataagcatccttttgtggtttatcttcattgataaacttgctaccagattctgtttgttgttgatcttgaatactattacgtaatgcttgcattgcttgatcaagcgcttttgcttcagctaatttttgcgctacttcatcacgagttgctgcgttgtttatttgactttcaagagcttgacgttgcggattatttaaaccatttaattgatttaaatcagtaactgcatgttgtttatcgtctgcaagtttttgatcaccatgtaggttatctttagcttggttaacaccttgtgtcaattgttcaacttgtgctttatcaagcgttggattgctagtttgattaattaaatcttttgcatgttgtactgctgcttggtatgcatctttttgtggcttatcttcattgataaacttgctacccgcttctgtttgctgttgatcttgaatgctattacgtaatgcttccattgcttggttaagtgcttgtgcctcagttaatttttgtgctacttcgccacgagttgctgcattattgatttggttttcaagtgcttgacgttgtggtgtattcaagttagacaagttatttaacgtttctgttgcacgttgcttatcttgagctaatttttgatcaccatgtaagttgtttttagcgtcattcactgcttgtgttgcttgatcaattactgatttaactaatgtaggatcagttgttttgttaatcaaatctttcgcgtgttgtactgcttgcgtataagcatctttttgcgcttgatcctcgttaataaatttactacttgcttcagtttgtggttgatctttaatactttcttttaatgctttcatcgcttcatttaatgcttgcgcttgtgcaatgatttcagtcactttatcacgagttgttgcattattaatttgattttctaacgcttgttgttgagctggtgttaattgatctaaatgattcagagaatttccagctgtttgcttatcttgagctaatcgttcaacaccatctaaaccatttttagatgttgtcactgcttgtgtcgcacttgatacatttcctttattgatagtcggattatttaatcctgcaaggatagactcagcattttgaactgcttcatcatatgcttgttttttattcggttctgcattgacatatgcactgctcgcacgtgttgcatctttgtcagcaatactttgttgtaatgtattcataagttgatctaatgcttgtgcttcagtcaaatcttgcttaactgctgttctagttgtttcactatcaattaacgtatcttccatatgtttttgtgcattgtttagatgtgctaattgactaaccgtttgtttagcatgatctttatcattttgtaacttcacatcaccatgtaatgctgctttcgttgtattcacagttgtcgctgcttgattaatcgcattattatctaatgtcgctgtttgctcattgataatgctatttgcagcttgcactgcttgatcgtagttttgttgctctggttgatcttcgttgatatatttgctatttgctttagttgctgcgttatcttgaatactttctcttaagccatgcattgcttggttaagcgtattcgcattttgttcaatttgatgaactgcagttactaaagttgcagcagtaacttggtcttttaatgctgttttttgaggatcatttaagcttgttaaagcatcaattgcttgcgtcgcatttgttttagcaacttgtaaattatgatcgccatttaacgcttgaagtgttgtttgaactttagtaatagcttgttctacttctgtttggttcgcattttgaccagtttgtttgttaatcatggcttctgcttcatttaccgctgtagtataagcagtttgtttatcagtatcagcattgatgaagttaccacgttgttcaacggcttgatgatctgcaatcgcattaattaagttacccattgctgtatttaaagattctgctgtttgtttgtgaacatttactgcagcaatatcagatgattgcgtaatttgtgattctaactgttgcttttgcgcattattcaaatgatctaattgattaagtctgttgtttgcttgttgtttagctgctgcaaggttttcatcaccatctaatgcaactttcgtgttattcacttgagttgttgcacgattaatatcatctgggttaagcgttggatttgtcgtttgattgataataccttccgcttgagacactgcatttgtatatgctgtttgcttatcggcatcagcatcatgatagttctcacttgctttgacggtatctttattcgcaataccttgtttcaagttacccattgctgtattcacattttgtgcattttgtttagtttgttcaactgtagctaacgcttgtgcttggttgatttgattacgtaacgcatcacgttgtggttgatttaaatcgcgtaacgtatcaagatttgctaaagcatcctgtttcgcttgcgctaatttttcatcaccgtttaatgcatctttcgcttgattcatagttgtaactgcttgtgttactgtatcaggcgtcaatacaggtgttggtgtgccatttgcgatttgttgcgcttggttagctgcattgttatatgcttgttgtttgtcttgatccgcttgtgtaaagtcaactgattgtggtacttgactgtttgcttgaatttgttgtttcaacgtacccattgcattatttaatgcatcagcattttgcttaatagcattaacacctgtaacaagttctgcatgtgacacttggtcttttaatgctgttttttgtggttgatttaagtttggtaactgatcaatggctgtattcgcattgtctttagcaacttgtaagttatggttaccgtttaaatcacccttagcttgagtcacttgttgtaacgcttgagccacttgttgtggatccacgtttgcatttggtgtaccactaatgatttgttcagcatgagctaccgcattgttgtaagcattttgcttatcagtatctgcattgacaaagttaccatttgctttagtttggtctttatctgcaataacttgtttcaattgtgtcattgcttgatttaaatcttgtgctgtttgcttaattgtgtttacatttgcaacagtttgcgcagcatcgacttgttgttttagtgcatctttttgtgcttgatttaaatcatttgcatttgtaattacttgtttcgctgcatcttttgcacgttgtacattgtcattaccattcaatgcttgtttcgcttcgttcgcacgttgcatcgcttgttccacttcagtttgacttgcattgctgccatttgctttagataaaatgccttctgcatgtgcaaccgcattagtataagcatctttcttagcttgatctgcatcagtaaagttaatgctatttaatttctcagttttatcgtgtaatgcattgtttaagttagtcatagcattattcagattttgagcattttgtttaacgttattaactgttgcaatatctggtgcttgttcaacttgagttgttaacgcttgtttttgcgcatcatttaaatgatctaatgtaccaagatttgtcttagcagcttgtttggcatcagctaatttttgattaccgttaagtgcttgatttgtatcattcactttagttaatgcttgttgaattgtatttggatccattgttggatttgttgtttgtttcaacaattcttctgcttttgttactgcattatcatatgctgtttgcttgtcagtatcagcatcgtgatagttctcgctacctttaatttgtgctttattcgcaataccttgtttcaattgtgtcattgcgtcattaagcgttgttgccgcttgttgaatagcattgacgtttggtacaagtgttgcttgcgtaatttgtttgttgtattcatcacgttgcgcttgattcaagtttggcaattgatcaatagcttgttgaacattttgtttcgccgttgctaagttcgtattaccattcaaatcatttttagcttgcgtaactttatttaacgctgcagtaatttcgctaggtgtaacgactacatcaggcgtaccactaattaatgcttcagcttttgctactgcttgattatatgcattttgtttgtcaggatctgcattgacaaagttaccatctgctttagttttctctttatctgcaatgccttgttttaattgtgtcattgcattatttaactcttgcgccgtttgtttaacatcgtttacaccagcaacagttgttgcattttgaacttgttgttttaatgcatctttttgtgcttgattaagatcgttagagctattaattaaagcagttgcttcgtcttttgcatgttgaacgttggcattaccatttaatgcttgttttgttgcattaacttgttggattgcttgttcaacttctgattgtgttgcattgccaccattagcttttgaaatgatgttttcagcatttgtaacagcagtgttatatgcttgttgttttgcttgatctgcatcagtgaagttaattgttgctttcgtagcatctttgtcagctatcgcttgtttcaagttacccatcgctgtatttaagttttgcgcattttgtttaatttgatttgcttcatcaacagtatgcgcgccattaatttgattagtaacagcttgtttttgcgcattatttaagttgtctaatgaacctaatgattgtgtcgcttgttgtttcgctgcctctaggttttcattaccatttaatgcatttttagttgtacttacttgtccagcagcttgattgataacattcggatctaaagttggacttgtagtttgatcaataataccttgtgcagttgtgacagcattattgtacgcatcctttttattcggacttgcatcagtataattttggttttgttttgttgtcgcattatctgcaatactttgacgtaatttgtccattgctgcatcaacattgtttgctttttgttcattaccttgtgcttctgcaacagtagtcgattgttgtaccaattgttttaatgcatctttttgtgcatttgttaaatggcttaaaccgtctattgctgtatttgcgtgttgtttagctttttcaaggttttgagtaccattaagcgctgcttttgtagtattcacttgattcatagctgcttcaacttgatctttaggcacgtttgtacctgtagatttatttaaaatattttcagcattacgaaccgcttcattgtatgcatttttcttctctggatctgcatctgcaaagttttgactgccaagtgtagtgtctttatcattcaagctatttttcaagttacccatcgctgtattcagttcctgagctgtttgaatggcttgcgttacttcagctacagtgtgcgcttgattgatgtttccagtaacagcacctttttgtgcattgtttaagttatctaatgtagataatgtttggtttgcattgtttttagcatctgttacttttctatcaccattcaacgcttgtttagtagttgttacagttgaaagtgctgcttcaacttgtgattggttcgcattagtaccatttgcttgattaataatattttcagcagcagttaccgcattgttgtatgctgtttgtttttctggatctgcatctgtaaagttaacactttgtttcacttgatctttgtcttggattccgttgatcaaacgttccattgcttgatctaattgttcagctttagttttcacttgatttactgtgctaatatttggtgcatttgtcacttgcgtatttaaatcttgcttttgagcattatttaaatgacttaattggttgatgttagcagttgtttcttgctttttatttgctaagttttgtgcaccattaagcgctgttttgttagtgttcacttgattagctgcttgtgttactgcagatggatcaagtgtcggctgactcgttgcattaatgatattttcagcacttgtaacagctgtgttgtatgcattttgtttatccgtatctgcatcaacatatggttgacttgctttaacttcatctttattcgcaatactatttcgaagttgattcattgcattatcaagatttgtcgcgttgtctttcacactttgaacgccagttacttgtgtcgcgctatcaatttgaccagtaatactttgtttttgtgcatcagataaatgtgtcatttgacgtaatgcatctttagcttgttgcttcgcagttgctaagtttgtatcaccgtttaaacctgtttcagcattattgacacgttgtgttgctgctgtaacatctgctgcatttgtaatcacattaggtgaaccatttacaatgtttttcgcagcattatatgcatcagtgtaagcaccttgcttatcaggacttgcgttagtgtaattaccaccagctacaattgtgtcatgatcagcaattgcttgttttaattgatccatcgcattattaagtgatgtagcactatttttcagatcagttacacctgatacacgttgcgcagcgttcacttgttgttttaatgctgttttttgtggtgtattcaattgtgtcaagttatcgatagcttgtgtagcttcagttttagcgcgttgtaagttcgcgtcaccgtttaaagcattcttagcagtcgttacactttgaattgcttgttcaacagcttgcttatctttattcgcaccatgacctttatttaagtaagattcagcttgagcgatggcattatcaaatgctgttttcttagttggatctgcgtcgatgtagttttcgcttgctttagtttgatctttatttgcgattgctgactctaatcgttgcattgcaccatctaagacttgtgctttcgttttaacaccatttacaccgttgactgttgttgcgccttcgatttgtgatgttaaatcttgtttttgtgcattatttaagtgtgttaatgtacctaagtttgctttcgcatctgattttgcttgtcttacatttgcgtcaccattcaaagcattcttagcagtcgttacttgatttaatgcagattcaacttgtgcttttgtcatattttgaccgtttgctttatctaaaataccttgagcattcgtaacagcatttgtgtaagcatctttcttaccttggtcagcatctgtaaaattcacttgttgtttaacagtattttggtcattaataccattttgaagttgacccattgctgtatttaattcattagcagtattttgtgcagcagttacgcctgctactgtcgttgcattatcaatttgactagttgctgcagttgattgcgcattattcaagttactatatgaagctaatgcacgtttcgctgcttctttagcttgagcaactttattatcaccattcaagtcatttttagcttgattcaattggttaagtgctgcttgaacttgtgtttcgttcgcgttgctgccattagcattagtaattgattctgcttgtgtaaccgcagtatcatacgcttgttgtttaggttgatccgcatctgtgtaattgacactacgtttcgtattatccttttcagcaagtgcatgtttcaaattacccatctctgtatttaacgatgtcgctttatttttagctgctgttaccgctgcaagatttggtgcatgatccacttctgcatttgccgcagttcgttgtgcattgttcaagtctgtcaaacgaccgatgtctgatttcgcagtttgttttgctgctgctaatttttcatcaccgttcaatgcagacttcgcactgttcacttggctcgctttttgattaatcgtatctggattcatttcagggttatttgttgcactaataataccttcagcattagttaccgcaccattgtatgcattttgtagatctgcattcgcgtcttgataatcttcgcttgatttagtggcatctttagaagcaatactttgtcttaattgattcattgattgatctaaagtaccggcattagcttgaataccttgaacacctgcaacagtcgtaccgcgttcaatttgttctgttaagtttgctttttgagcatcagttaaatgtgacattgtcgctaattgttgtttagctgtgttcttcgcttcatttaatcgagcgtcaccatttaatgctgttttagcagtattcacacgttgtaatgcttgttcaacggctgctttgtctacattttgaccactagcttttgttaaaattgctttcgctgcatttacagcttgatcataagctgatttcttacttggctctgcatctaggtatttctgagtttgttttgtttgtgactcatcattgataccattctgtaaactatgcattgcgttatttaattctgttgctttggcagtttcttgatttacaccagctactgttgttgcaacatctatgctatgcgttaatgcatctttttgtgcattgttaattgatgttaagttattcaagttgtttttcgcagttgtcttagcttgagctaagttttgcgcaccatttaatgcatgttctttagttgtcacttgtgatgttgcttgcgtaatagtatttggttccatcgttgggttcgatgtttgattaatgattgcttttgctgcagtaactgcactgtcgtactcgttacgattatttggacttgcgtcagtgtagttttgacctgctttaattgttgcttcattcgcaatactatctcttaagcctttcatcgctgtattcaacgtttgagaactatttttaactgtttgaacaccatctaatgtagttgcactttgaacttgttcttttaattttgctttttgtgcattattcaattgcgctaagccatcaattgtattgttggcatgctctttcgcaacacgtaagttgttatcacctatcaaaattcggcttatttattcattttgacatattcaaatacgcaaaaagactatttctaccttgtatcgatagaaatagtctttttatacttaattggtttaatttttcataaaatcttatactctttaaaaatgggatgaaatatattttcctgaaacatgtaattcatgttcgttacaaattgataaaatatgattaagcgtcgttgcaaatgacattttctcaaaaagtgcttcactatcaattggtacttgtgtgtgaatttcagcaagtcgcttcgataaatatagttcatctaaattgtcattaatcttattacgttgcccagctgataatgcatcaatgttttcaaccacattttcaacgctttgatattgctgaattaacttaatagccgttttctcaccaattcctttaacacctgcatatccatctgctgtatcacccataaacgctttaatatcgattagttgttgtggttcaagggcatattcttcgttaaaacgatgtaatgtatatctattataaatgttaaatccttttttaattagccaaacttcaacattgtcattaatacattgcagtaaatctttgtcgcccgtaagaatatagacatcgttatcagttgaatattgttgtgctaatgtacctataacatcatccgcttcatagtttttaacgccaatatttacaaagccaaattgctctgaaatttctttaacataatcaaattgtggtatcaattcttctggtggtgcagaacgattttgcttataaccatcaaacatatcatttctaaaagttgattgtcccatatcccaacatacagctacatgtgtagggcgtatttcatgtattgccgaaaagatatgacgcacaaacccttgtattccatttgtaggtacaccttgtgaattgtacataaattgtttatgaagacttgtagcatagaaatgtctaaataatagcgccataccatctacaagtaatattttattaggcatttaaaacgttccttctttcttaatataaaatagttttcagttgttgatgtttatctttcaattgattaataagtgttgtatctaaatcaaacgctaataaatcgtttatttgtgtttgaatattagcttcaaaactttcaaattgcgattcagcttctacagccatttgcttaacatataattcaagttgttgcctcaataatcccatttgtggttgtaataatcctaacgtactttgacaaattgattcatgtatatctctttgcccatttggattcaaaattttacgttttgttaattgtttaggcaatgcatttagcatatcgttgaaatcgatgtgcaataatggttgctctatattagctgattcaaagttaaactgaggattaacaatgacatgtaaatctgctaattgttgaacgattggtgcaatttgctcagtgagttgcttattaaagtatttttttatacgttctgtaattaaagattgctctaaaaacaatcgttgatgaatttgatctaagtatactctcgtagacactttcttttcttcattaaaatcactattttgcgtcatttgagaattaaacactgatttaacatcgtcaagtagttgtagttttaaacgggcatttaaatgataaacttgttcttcaacttcgttgtctgtatgttgtaacgtcgcatcaattaattgatgttgtaaacgctgtttatctttatagactgttaacctttgttggcgacgtgaaatatcagctttatttgtttcaaattctgtaatcatctctacataagaacgatccatttgttgaagctgatgaatcatttgttgttctaaaattgatttagattcaacatcaacaaattgttgtatgctttgttttaattgatcaatgcccttatcttcatcttgcaatgcatttcgacttgatacagcaaaaatgtctgattgtaagtgtacttgtcttaatgcatctgatacatatgtttcaaccgcttcaagatcatcttgactttctgctaaatcagcagcattaattaccattttaaatgcttggttttcattcaactggttcatatctttcatgtgttctataaacgccttgtcattatcagtaaatgaatgattaaaataacttacatacaatattaagtctgaagaagttaaaatttgctcggtttcatttgtatgcctttggttatttgagtgtagccctaatgaatcaacaattattttaccttttaaccaatcatgcattaatgcaatgtgtactgttttaacaaatgttgcatattcatcttctgcactccactttttcaattcttgttgattaatggcatgtttttctccgttttccaacatattgacatacaaattataatgtttttcaattgcatgaacaaaagcgagttgatttttatttaaatgtgattttaacttttctaaatctgaattaataaagtcttctatagttgaaaaagatatattttggtattcaactactgcattaatttcatctaataattgcgattgtgattttagcgttatataactctcatctccataagatatttctgtagtagctgctgtagtaggatttggagaactgactaaaatatgctcgcctaataatgcatttatcaaactacttttacccgcactaaatgttccaaatacacctatttttattaatttattatctatacgtgttaatgtttcgtggatatcctgctttgtacgcttgaacaaaggcacatccgaaattatatcaagtgctttttgaatatctatagacatatttgttgtagctgtattttgatttagctgctgatgatcacgattatcctgagcattatcagtagccacttgatatgttgtctcttgtcgatctactaatttatctagagattcatctaaatgaatatagtagtgacgataattcttagtcgtcaatgactgacgcagctcatttaattctgtataacgttgatattcttttaaatcatcactttcttctgttggtaattcatctgcctgcacattttctattatttctttaaaaatcggtgttgattgttgttcaacatatttcttaatggctttaaccacttcgtctgaaaatgtaagtacataagtattgctgattgatgtttgtggttgatataaaccttcaatcatttccggcttaacgtcataatgctgatttaatactttatctgaagcttcttttttattgataaaacgcgtaacaaatgacatatcttctcgcattggttgacgaatttgttgattaacatgttcttgtaacgcatctgtcgctgttaataatcgctgttgtcgaatttgtagctttttcttctttttattaaaaaggccgccaacattaaagtcttgagacatactctccaaataacttcgtaacatttctctcatattatgcggcataatgtatgcattttctaaaatatttttacgcttattctttaaaaatgccattaattcatctggattatttaaaagttgtgcctcttcactaattgcttgatgttgttgactatttaaaaatgcttgttcaaactctgcttcttcgatacctaaatcttctagtacttcctgaatttcagactgaatgtaatctagctgagcttcggtaatatattcaaccgttcttgatgtataatcctcaattgtctctctatgttgatctaatgaaactagataacttgataatgcttcaagttcattttcagggtgatcaaatttcgatacataaaaggtgcgttctaatttaataccccaatctgcaattgatttttcaactcgtgatttaaacgtagagaatgacaattcatcgtcttgatgcttgtcaatttgattaatgataaacacaacaggtattccaacatcatttatatgcttcataaacttaaagttaagttcagattgaacgtggttatagtcaaccgtataaaatatcatattacttgtatacatatattgttctgttattgactgatgtgatgcaacatttgaatcaacacctggtgtatcttgcaacgtaaacccattttcaaatttagctgattgaaaattaatttctacagattcaacgtcgacattttggcgattcatttcccttacttcatcataattagataatttggcatacgtttgattcggcaaattagcaataatatcgtgattgtcggaaactgacacgatagcagtattacttgtcgttggtacaggtgaacttggtaagatatcttgttcaattaataaatttatcagtgtcgatttacctgcagaaaaatgtccaacgaacgaacatgtatattgctgcaaatatactttcttaattacttggttaattgtatgtaaaagtgcttcatttcgcgacttttcaacttctttttttaatttatataaaagatctaattgttttttattaatcatgttactttcccctttggttcgttcacatataaatgcttgcttgttaaaacgaattcatacaatatcgatgtccatttaaacataggtcgttaaaaggctcgcattgtattatgtttaaattttatcatagctgcttgataaaacatacgaataatcaattttcttcaaacattccaacttaaaagttcatttttctaaaaatcacaaatcatcgttaaatttttctagaaaataaatattgtcacagtttgttcacacacgtcacagaattgacaccgtataatagccaattgggagggaaatatgaaaaatacatttaatccattacaaagattacatttctatgcagcaatatttattgctccactgttaatcactttaaccatttcaggcattggttacttgttctttccagaagttgaaaataatatttataagaatgatttttttggtgacagtgatgtcaaaacgcatcaaacattaaatgatgcagtacatcaagttgaacgacaatatgaaggattctttgtaagtaaagttagcatacttgatgaaccatataacaaacgaattacactgagtgatatggcaggaaatcagagttacgtctttctagatcataacaatcaatttgttgcagatcaaaatgcgaaacatacgtattctaatgtgatgcgaagtatacatagttctttgtttactgaaaatactattattaattatttagtcgagttaaccgcatgttggacgatattcatgattttatctggtacttatttactcattaagaagcatttaatttctaacaaaagtaaggcacttcgttggcaaaagtggcacgcaatgattggagttatcattgcaattccagtatttgtattagttttaactggattgccatggtctggttttatgggcagtaaaattgccggtatgatggacacaaacggtgaccttggtcaaggtgaattagcgattaatccacctaaatcagatttgaatgaattaccttgggctactcgtaaaaataaacagccagcttcatccgaaaaaggttcaagtagtcatcatggtaatgcagcaatgcctcaaaccaaattagattatcaaatatctattgataaggtcgttgaacaggcgcaaaaagctggtattaaaaagccgttttcaatcgtatatccaagtgataaacatggtacctttattgtatctaatactagtaattcaggtgttactgggctagatgtatcacctaacaaggaacaaacactttatttcgaccaatatagcggtaaaaagctaggtacgattaaatatgatgactacggtattattgctaaatggtttacatggggcattccgcttcacgaaggtcatttattcggtattttaaacaaaatcattaatttatttgtatgtatcgctttattagtagccattggtatgggatttgtctcttggataaagcgtacaaaaaatactgcagtaaaagtaccacatcgcgtaaaaaaaccagcatctatatcactcattatatgtttaattgtattaggactattaatgccattatttggattatcacttatcctagtatttataattgaattaatattatatattaaagatcgtcgtgctaaacaataatgcacttaaagttttgaactgacgaaatttacaaaatgattctcgactctctagttacttaaaacgggttctataataaatcgaactgatgaaaagttttttacttttcatctgtccgattttttgaatttgaagataaaaaagcatctaaaacgtataagaagattactttacttcttccaaattacgttatagatgctttttattaattcatatgcatgtcgtgaattttcatcattaaaccgtgtgggacgtcatcatgtttaacaatttcatgtttataaaatgtcttcccatcatctttagaaactaattttacaaagtctccttttttcggtttaaaatcatttgatggttctactttgatattatgtttgactaatccatctttttcactgacaactttttctgcatttgtattactattcatataaccaaaataagtcgttttttgactagaaaaaatcattaaacatacaacggcaataccaataacaaccaatgctatagataaacctagacccatttttttacccatttatagactcctccatttttcaaaaatacctattatcatgagaacttaattattactaattttagtcacacattagaaacactttagttttcaatagttttacgttctgtttttttaccccagtattgataataagtacattctatatatccattaaataacttacgtcgcttcgttgctttacgatctactaaatattcaaattctttattacttgttaaaatgtatgtagataaaaatggatgttgtttcattagtttaccaatataacggtacatttcttcaacttcttcacgatcaccaatacgttcaccatatggaggatttccaattaacgccaccggttcttctgtatcaattgttaacgtattgacatcttttacactaaatttaataatatcagacaacccaacttcttcagcgttacgcttagcaatctctaccatttcaggatcgatatcagaagcatatacttcgatttctttatcataatcagccatcttatccgcttcatcacggtaatcatcataaatatttgctggcatgatgttccattgctctgatacgaactcgcgattaaaaccaggtgcgatattttgagcaattaaacaagcttctatagctattgtacccgaaccgcaaaatggatcaattaaaggtgtatcacctttccagtttgcaagacggattaaacttgctgccaacgtttctttaattggtgcttcaccttgtgctaatctatatccacgtctgttcaaaccagaacctgatgtgtcgatagtcaacaatacattatcttttaaaatggcaacttcaacggggtatttcgcacctgattcatttaaccaacctttttcgttatatgcgcgacgtaatcgttcaacaatagctttcttagttatcgcctgacaatctggcacactatgtagtgttgatttaacgcttctaccttgaactgggaagttaccttctttatcaataatagattcccaagggagcgctttggtttgttcgaataattcgtcaaacgttgttgcgttaaaacgtccaacaacaattttgattcggtctgctgtgcgcaaccataaatttgcctttacaattgcacttgcgtctccttcaaaaaatatacggccattttcaacatttgtttcatagcctaattcttgaatttccctagcaacaacagcttctaatcccatcggacaaactgcaagtaattgaaacatatatgattctccttttatacaggtattttattcttagcttgtgttttttatacatttccaacaaatttaatcgctgatacattaacgcatttgcttatcattttaaaacaaggcagtgtcattatatcaagacaaggcgttaattttaagtgttcttttcatgaaaaaagctctccatcatctaggagagctaaactagtagtgatatttctataagccatgttctgttccatcgtactcatcacgtgcactagtcacactggtactcaggtgataaccatctgtctacaccacttcatttcgcgaagtgtgtctcgtttatacgttgaattccgttaaacaagtgctcctaccaaatttggattgctcactcgaggggtttaccgcgttccaccttttatatttctataaaagctacgtcactgtggcactttcaaattactctatccatatcgaaagacttaggatatttcattgccgtcaaattaatgccttgatttattgtttcatcaagcacgaacactacaatcatctcagactgtgtgagcatggactttcctctatataatatagcgattacccaaaatatcacttttaaaattataacatagtcattattagtaagacagttaaacttttgtatttagtaattatttaccaaatacagctttttctaagtttgaaatacgttttaaaatatctacattatttgaagatgtatttgttgttgtattattcgaagaaaaacttttattgtcctgaggtctagatgttgctacacgtagtcttaattcttctaattcttttttaagtttgtgattctcttctgataattttacaacttcattattcatatcggccattttttgataatcagcaataatgtcatctaaaaatgcatctacttcttctcttctatagccacgagccattgttttttcaaaatctttttcataaatatcttttgctgataatttcaatgaaacatctgacattttttccacctcattagaaactttgatcttcagaccactgtaagtcattgatgaatgctgttaattcatcgaacgtcacaatatcacaagtatagtttgttttatccataaaatcaactaacatctgcttgaagaacttaggactcgcctcttgttcctcatcataaatgagcaatgtttgatccgaatgttcaagcataaattgatctgcttgtttaaattgaaaaggaccttgatatgacgtatgaaaaatactatcaacataatctgcatgcttaattatgttggcatacttactttgattatgttcattccacttttctgtatgtccttggaacggtgtaattacagcaaactttaacgaatcatatgttcgttgtaattcaataacaacttctgcagtccataattctatacccatttgcccttgtattaacacccattctaatccttcatccaacagttgttcaattttatgttttataaattgttttaaataatgtacttcaggtgcgtcatctttaaaaatgtttaattcgaatgatttgtaacctgttacataaactgttttaaccataagtgccctctttagttatgccatctaatatattttgtaaatcatattgaacacttttaagcttttctataaataactttctacttgttcgcttaaaatgacattcgacagaaagttgttcaatgttagcaatcagtagctcaaatttctttgaattcatataaggtacttctataataaattcacgatgtaatttgatctcattgagcaagctatcaatatgttcagtatatggctttacagtttggtaaaaatcatgatcttgttgttgtgatttcacattttcaaaattttgttgcatgttgttaacttcataaattagtgattcgactacatcattcatgaggacgcctcctacattttttaatttatcacaatatactgtattcgtcatgttttaacactctatataatttgatttaactattttttcaaatgtgttatctgttaaatcaagtaaatctaaaaacttcctatataaatacaaaattttatcgtgtatgttgttatacgatgaaaatacttttaatctaataaaatcatttaaatcaaatacacctctgctgattaacaacacatacttgtacttgcctcaaaaataataattactgatcatgatttgacttttataacaaaattcaaaaatattgtaatgagtattcatttttataagcaaaacttttcaatcaattaaaattgtgtgtaaaattccaacattaacggtaaatgtattataatattattgtgttaatgctgaaatcacgttaaaataagctttggtgtattgtgtctttcgcatttatactaatttaagtttggtgtttcactataatgttgtgtataataaacaacgtttactaccaaacttgtgtggtgaaatttatgaattatccaaatggtaaaccatatcgtaaaaatagtgctatagacggagggaaaaagaccgctgcctttagtaatattgagtatggtggacgtggtatgtcacttgaaaaagatatcgaacattcaaatgcgttttatcttaaaagcgacattgcagttattcacaaaaagcctacgccagtacaaatagttaatgtcaactatcctaaacggagtaaagctgtgattaacgaagcttattttcgtacaccttcaacaactgattacaacggcgtttatcaaggttattatattgattttgaagcaaaggaaactaaaaacaagacgtcctttcctttaaataatattcatgaccatcaagtcgaacatatgaaaaatgcatatcaacaaaaaggtattgtgtttttaatgattcgttttaaaacgctagatgaagtttatcttttaccctattcaaaattcgaaatattttggaagagatataaagataatattaaaaagtctataacagttgatgaaatacgaaaaaatggttaccatattccttatcagtatcaaccaagattagactatctaaaagcagttgataagttgatattagatgaaagtgaggaccgcgtatgacggaaaacaaaggatcttctcagcctaagaaaaatggtaataatggtgggaaatccaactcaaaaaagaatagaaatgtgaagagaacgattattaagattattggcttcatgattattgcatttttcgttgttcttttactaggtatcttattgtttgcttattatgcttggaaagcacctgcttttaccgaagctaaattacaagatccgattcctgcaaagatatatgacaagaacggagaacttgttaaaacattagataatggccaaagacatgagcatgtaaatttaaaagacgtgccgaaatcaatgaaagacgcagtacttgcaactgaagacaatcgtttctacgaacatggcgcacttgattataaacgtttattcggtgcaattggtaagaacttgactggtggatttggttctgaaggtgcctcaacattaacacaacaagttgttaaagatgcatttttatcacaacataaatctattggacgtaaagctcaagaagcatacttatcatatcgtttagaacaagagtatagtaaagatgatatcttccaagtatatctaaataaaatttactattctgatggcgtaacaggtattaaagctgctgcaaagtactactttaataaagatttaaaagatttaaacttagcggaagaagcttatttagccggtttacctcaggttccaaacaactataatatttatgatcatccaaaagctgctgaagatcgtaaaaacactgttttatacttaatgcattatcataaacgcattacagataaacagtgggaagatgctaagaaaatcgatttaaaagcgaacttagtaaatcgtactgctgaagaacgtcaaaacattgatacaaatcaagattctgagtataattcatacgttaactttgtaaaatctgaattaatgaataataaagcattcaaagatgaaaatttaggtaatgtattacaaagtggtattaaaatttatacaaacatggataaagatgttcaaaaaacattacaaaatgatgttgataatggtagcttctacaagaataaagaccaacaagttggtgcaacgattcttgatagtaaaactggtggtttagttgctatatctggtggacgtgatttcaaagacgtcgttaacagaaaccaagcaacagatcctcaccctactggttcatctttaaaacctttcttagcgtatggacctgccattgaaaatatgaaatgggcaacaaaccatgcgattcaagatgaatcttcatatcaagttgatggatctacatttagaaactacgatgtgaagagtcacggtactgtatcaatttatgatgctttacgacaaagtttcaatatcccagctttaaaagcttggcaatcagttaagcaaaatgctggtaatgatgcacctaagaaattcgctgccaaacttggcttaaactacgaaggcgatattggtccatctgaagtacttggtggttctgcttcagaattctcaccaacacaattagcatcagcatttgctgcaatcgctaacggtggtacttataacaacgcgcattcaattcaaaaagtagttactcgtgatggtgaaacaatcgaatacgatcatactagccataaagcgatgagtgattacactgcatacatgttagctgagatgctaaaaggtacatttaaaccatatggttctgcatatggccatggtgtatctggagtaaatatgggtgctaagacaggtactggtacttacggtgctgaaacttattcacaatataatttacctgataatgcagcgaaagacgtgtggattaacggctttacacctcaatacactatgtcagtgtggatgggcttcagtaaagttaaacaatatggtgaaaactcatttgtgggacatagccaacaagaatatccacagttcttatatgaaaatgtgatgtcaaaaatttcatctagagatggcgaagactttaaacgtcctagctcagtaagtggtagtatcccatcaatcaatgtttctggtagtcaagataacaacactacaaatcgtagtacacacggtggtagtgacacatcagcaaacagcagtggtactgcacaatcaaataacaatactagatctcaacaatctagaaacagcggtggattaacaggtatattcaactaatccactcaacataaaatcctcagttataccatatttatggtgtagctgaggattttttataagtattcataagctattgctatattagtagaaaccgtaaaatcagtcattcacattcattttgaaacatctaaatagtttttcatattcacatctttagctattttaaattattgaaattgcaaaaatggttgttcccatttttaaaattatgattatattttctcatagtcatcttagacgctgttttaaattgatatgtttatcaattccctgtgtacgttaatcagtgaaatatcaacatgtttgtaacgtattttcacattcatagatataagaaatccacctacgattcgaaatagatatcttaaaacatacctcaagatatccattatgatgtagatggacagtttttatattaagacattgtaatgacacgacaactaacatatatacaaatatgtgtgcatgaattagttttacatcttttcaacattaggaaatgatcaaacttgtctatacctgcttattctttaaccttgtttgataactagcattcattttaatcaattcagttttaaaggtcttcatttgtcgatagcccataaaatgatatttacgttcaatcatataatcatatctttccttaaaattcattggcacaacaggatattgatttaaattctcaaaatcaatattgccaattatgtcattaacctgcttaaaataatcaataattttactatggtattcatccaagtagggctttgcttcactagaacctaatgtcttatttttggcaaatacatcaatctcttgttctaaattatcaaatacctcttttgtaatatttgtcatgttatcacgcttctttcaaactagctttataacgtttttgtccttctctacactcttctaatagtggacaaatatcgcatttaggttttcgggctaaacagtggtatcttccaaagaaaatgagttgatgatggctcctattccatctatctctaggtataacagaacataaacggtcttctacctgtctcacattatctttccaacgattaatacctacgcgtttagaaacacgttctacatgcgtatcaacagctaatgaaggttctccaaatgctacactcatgactacattagcagttttacgtcctacacctgctaaactttctaattccttatgtgtttgtggtatttctccattaaattgatcaatcaaagattgacaaagtttcttaatattcttagctttgttacgatacagaccaatagaacgaatatcattcataagttcttcatcactgactgccaaataatcttcaggcgttttgtattttttaaacagctcagttgttactctatttactagaacgtctgtacattgcgctgacaataatacagcaatagttaattcgaacggattatcatgttttaattcacattctgcatccggaaacatatttgctataacatcaatcatttctaatgcttttttcttacttaccatcaaggttctccccgtttaaccaatcaaatttaggtaccgttttaactgtgtgcgtcattttcggtttattaaatttttctcttatttttctagaatcgtcaattgttttgacattgtttttcttccaattaagtaaaatacgatccatatatttaaagctaagtttattcaaactattcgcctcgtctaatgccgcttgtataattgcagtatcgtgtttatcaacatcaatccattgatttaacgtttctatttcatatggagataacggccttgcaaatgtatcctctaaaactctaaataattgtttaaatttttctttactattttgctctttcgtttccatactttgttgcttcaatatatgacttaatttttcgaaaaaaggatctagattcatatattcggtaaatctaccttcttcatctttttgaacttgtaattctagcaattcacgttgtatcaaattttgaataaccattgtaatatcacgtggttgcatagttgagcccttctgaagtaattcaattgaaggctgtttatttgatgtttcggaagcataaatcaatttaagcaaaatgactaaatcttgctcatctaaacctaagtcactgtaatggtctaataattctcttcgtatcactacaggtcttgcttttaattgatatctatccatgttcgtgcccccttttaaatttaaccattacttaatagtataaatcattttctttaattttcgactaaaatgcttaatatatttaactagtagcaaacaaattttaaataacagtatttttttaaaactagtttttaacaatgaactttatgtataatcagatgagctatttattttccaaatatagttactaaacaaaagtttgttcatgcttaatgaaagccgttatcaatctacattttccaagcataaatcgcccagctattaatataggctggacgattctttttattatcataatataaattttaagtaacgatcctaaaacttatggatataaacggtttaataatcttgggaatggcgcagtttcacgaacatgttcaacaccagaaatccatgctactgtacgctctaaacctaaaccaaatccacagtgtggcacactaccataacgacgtaagtctaagtagtaactatatgcttcttcgtctaatccatgttctttaacgcgttgttctaacaattctaagtcatccacacgttcagatccacctataatttcaccgtatccttcaggtgcaattaagtctgcacataatacagtttcttcattctcaggatttggttgcatatagaaaggcttaattttagttggataattagtaataaacaccggtaaatcataatgattagcaatggcagtttcatgtggcgcaccaaaatcttcgccccattcaatatcatcaaagccttctgcttttaagaattcaattgcatcatcatatgaaattctagggaatggtgtcgcaactttttcaagttttgatgtatcacgctctaaaattttcaactctagtttacaattttctaaaactgattttactacatgtgttacatattgttcttgaatttctaaactttcagcatgatttgtgaaagccatttccccttcaatcatccagaactcgatcaagtgtctacgtgtttttgatttttcagctctgaaagttggaccaaatgaaaatacttttccgtgtgccattgctgcagcttctaagtataactgaccactttgagataaaaacgcatcttgatcaaagtatttagtatggaataattcacttgtaccttctggcgcacttgctgtcaaaattggtggatcaacctttgtaaatccatctttgttgaaaaattcatacgttgcacgaataacttcatttctaattttcattacagcatgttgttttttagaacgtaaccataaatgacggtgatccattaagaattctgtaccatgatttttaggtgtaatcggatagtcatgcgcttctgaaataaattcaattgatttcacttgcatttcgtatcctaagtcagaacgattatcttctgtaattgtgcctgtaacgtatagagatgattcttgagtaatttctttcgcttgtttgaatacctcttcatcaacttctgatttaactactacgccttgcataaagcctgttccatcacgtaattgtaaaaaggcgattttaccacttgaacgtttatttgttagccaagcaccaattgtaacgtcttggtttaaatgatctttcgcttgtttaatcgttgttttcataaccattctcctatttattttttcgttatacaatactcattcattttaacaaaatccgctttcaagttctagaactagactaaaagataacgtgtaaatggtaatgatttaagcacagatttgaacattaatttatattaagacaatacaatcatcagtttcagacaaaatatataataaagcctcaatattattagtataaaggtcgtttttgtgccaacattcaagtttaattataaaactcaaattttgacgaccaaacaaaaattcttgtaacagaacatagcacatgtcatgtcacaagaattttactttgtattttactttttctttttttgaatttgtcttaataattttccaaactgttgaatgtcgccttttttctgacgataattttcaagtgtttgttcaaaaaagtttttataattactgtttatgagtcgatcatcaaatgaaacgattatgccgcgatcattttcatttctaattaatcttccaagtccttgtctaaaacgtgtaactgcatcaggtaatacatattccttgaaagttgaagtgaattcagaatccataagccaatattttgcattatgcttgttcataaacggtaacttcgctatcatcacacatttaataccatttgcttgaaaatcaaagccttcaaaaaaatgttgacgtaccaaggagtatggccttatcaaaattattaaactgttgtactattttataattttggttctgctgttgtgttaatacaacataatcttcaaattctggcaattcatttagcatatcttgtaccatatgcatcattttataactcgtaaataagactaaacattttgatgacgttatagtcgtatattcaataatatagcttacaatcgatgctacatactcatctatatttttatattgataagatgctacatcactcggtataaatacacttgtattttttgcactttgtaacgacgtgttaacttcaaatgtattaaagtgaacatctttgttgaataactgtttaaaagcatcaaacgaatgattaaattttaaagtaccagatataaaaataagtgatttaaatttttccaatacttgtttcgttaatacgtcttttacagcgtaatctttcacatataaacgtattgttgatttttgagatagatttttaattgaaatgaaactagtatgtccagcttttaaactttgttcgatatttttaaatttatcttttaaatacaacaactgtttccgtaatgatttaactgttttatgactaatgccattgaatatttctagcgttttatttaacttatcgataatcgcatgtaaatccttcaaaatgtcttttgtttcaaaagtaaatacattatggaagcgatgaatatcatcatcataaacatcagaatcattgataatcgtaaatatcgttgagaacaattgctcatttaactcatgaatctcattcatactagccttcaagccaaaaatatcaattggtgcaatatctaatttttccaatattcgttgcttttccagttgatcaattgcctttaacaatttttcattttcgtttttaccaatcaaaccaagctgatatttaatatcagcataactcaactcatttgtcacttgatttaaggcatagtctggtaagcgatgtgcttcatccactatacaatcatcaaacaattgatatattgaattttcaacatcagaatgaattaaatgtgcatgatttgtaataccaatttgaatgttctgtgcatttcgcttaataaaattataataatgaacatcgtgacgtgccggtacatatgtttcgattttctggtcaaaatacatcttttgaccaccttttaaatttaattcctggatatctccggatggcgtctctgtaatccaaatcagcaattgcattttcaagatattcacttcgtaattacttgtgtcatcttttaaaatttgactaataagtcccaatgaaatgtaatcacttttacttttaatcaatagtgcattaattttaaaattcaacgcttcattcattgctggaatatctttttctaacaattgactttgcagtaatttagtattggtagaaatcatgacatgctttccagtttcaatattatacatcaaggccgcaagtaaatatgctaatgatttaccactgcctagtgatgcttcaatcattgctttttcactatgcatgagctgatctaatatagtttccgctaaatataattgttgcggtcgatatgttaagccaagttgatctacagctttgctatataaagacttcaagctgccattataatttgttgtcggctttttaaaatcaacttgcttacgatagataatctgttcgaacttttcgtacgatttatccaatggctttgcatcatattgcctaaccatctcaaagaaaatatcatacaaatcgtatttcaactgtttacttaaataatataattgctttaaagtatctaacggtaacttttcaaatttttcaaaagctaatatcatcaatttagcagtagtagcggcatcttcgtcagctcgatgggcatttgctaaggtaataccatgtgcctctgctaattcacttaattgatagcttttatctgtaggaaaagctattttaaagatttctagtgtatctataacttttttgggacgatattgaatattacaatctttaaatgcctttttaataaaatttaaatcaaaatctacattatgagcgacaaaaatgcaatcttttatcttatcgtagatttcttgtgcaacttgattaaaatatggcgcttgttgtagcatattttcttcaatggatgttaacgcttgaatgaatggcggaatctctaaatttgttctaatcatagaatgatatgtatcaataatttggttattgcgcacaaacgttataccaatttgaatgatatcgtcaaaatctaattggttgcctgttgtttccaaatccacaacggcataggttgccatacccatagctatctctccttgctttagtgttaaaaatctatatctgcactaattaaacggtgtgattcacccgcttcatctctaacaattagatagccatcgtaatctaaatcaattgcttgtcctttaaactgtttatcattttctgtaaatagcaacgttctattccaaatattagaagctgcaatatattcttcacgaatttcagaaaaaggtaacgttaaaaattgattatatcttttttcaatttcttgaagtaatctctctaaaaattgatatctatctaatttatttttatcatgtaattgtatacttgttgctctatgtctaatactttcatcaaagtcttctagttgttgcgtcaaattaatacctataccacatattattgcttctataccatcattattagcaaccatttcagttaagaaaccacacactttaccattatcaatatatatatcattcggccatttcactttgacttcatcttgactaaaatgttgaatcgcatctcttatccctaatgcaataaataaattaaatttagatatcattgagaatgcaacgttaggtcttaacacgacagacatccaaagtccttgcccttttgaagaactccaatgtctattaaatcgcccacgacctttcgtttgttcatcactcaagataaaaaatgaagattgatttccaacaagtgactttttcgcagcaagttgtgtagaatctattgaatcgtatacttcactaaaatcaaacaaagcagaactttttgtatattggtctattatgccttgataccaaatatctgggagctgttgtaataaatgccccttatgatttactgaatctattttacatccctctaactttaattggtcaatcactttttttactgcagtgcgcgatatattaagtgattccgcaatgctttgtccagatatataattcggtttatttttatagagtaattgaagtacatcttgactatattttgacatgattatccacccatttcaaaatttcagtttcttcgttgcttactttacctgttacaatcgctatctcaatttgtcttagcagatcttttaaccacggaccacttttggcatttaaatgtgccataagtacaccgccattaaccatcatgtcttttctattatgcataggtaaacgatgtaatgtttcatcaatcgtttgaaggttaacgattaatggttcatgtccttgaatatcatttgcctttaacacgtctgctgcaaccattacatttttaatgagattcgtatcataatcataaacaaacatttttaattgttcttttgtattaatacttggtaatgcattcataatttgaatatattgattgatatcttttacttgtcggttacttagctttaaaggcttcaatgagtaattaatatcaaatttaactgatactatagcaatcaacaattctaaatcaattggttcagtcacattaatttgattcatatcaatatgttcgaaatatggcatataattaaatgctttcagcgattttaaatgattaaaactctcttcaacattaatacctcgcattaatttagttagttcaatcactatacgctcaattgataaaaatttaatatctgccatttgtgtacgcatcgcttcaaatgtttccgttgcaatttcaaatgataattgtgactggaatcttaaacatcgaatcatacgtaaagcatcttcttggaatcgttcctcagctatacctacagttcttattattcgattattaatatcttgttgaccatcaaaataatcatacaatttgtatgctgtatccattgctatcgcattcatcgtgaaatctcttcgttgcaaatcttcgtataaatcacgaacaaatgtaacaccacttggtctacggtgatcgacataatcttcttcagcccggaatgttgtcacttcataattttcatcattaaaaactacatttatggtgccatgttctttacctacaggtatcgtatgactaaagatagattctatttcatctggcgttgcacttgttgtgatatctatatcatgaatatttcttcccatgacataatctcttacagagccacctacataatatgcttcaaaaccattgtcttgaatttgttctaatataggccttgcctgttcaaataatgatttatccatattattactcgcctttacttttgttatgctcatttagcattttttgataataatgctcatattgatctgtaatgagttctgatccaaaacgttcagcaatatctgctagcatgtttttctgaagtttgttgtataacaccttatcttcaagtaatcggatagcatagtcactcgccgaatcacaatcacccacatctacgacaaatccagtttcaccatgtttaataacctctttaattccaccggcatttgaaccaattggaacgacgcctgttttcatagcctcaagtaaagttagtccaaagctttctttttcacttaataataatactaagtcagataattggtaaaattcacttacgcaatcttgtttccctaaaaataaaacatcctcttctacgtttaactctttcgtcaattgacgcgttggcactaattcaggaccgtctccaagtaaaattaatttactaggtatcttttcacgtacttttgcaaatgtttctataatagtatctatgcgttttacttgtctaaaattcgatacatgtattaacactttttcatctggtgctataccaaattgtgattttagtgctgtgttatgtttagttggaaactcattttcacgtacaaaattataaatcggtataatttctttgttagtttcgataatttcatgtgtttcttgcgctaaagatttactcacacttgtcacaatatcacttttttcaataccaaatttaattgcaccttggagtgaatgatcatagcccaaaactgtaatatcagtaccgtgtagcgttgtcataatttttatatctttacctgacatctcacgagctaaaataccacaaattgcatgaggtacagcatagtgcatatgcaacaaatcaagatcatattctttaataacttcagcgattttagtacttaacgtaatatcatacggtggatattgaaatactgcatattgattcacttcaacttgatgaaaaatcatattcggtaatggttttcttattctaaacgggatatttgaagtgataaaatgtacttcgtgacctcgctctgctaatttaattcctaattctgtggcaataattccagaaccacccatggacgggtaacatgttatacctatcttcattcgcttgcccatcctttctttctatttctctttctattattctcgatgcgtagataattgtttaaatttaagtttatagtaatgttgagtttataatttcaaatatctaaaaaacaggtgttgtatatataatcatttatctagttatacttactttaaaaataatatgatttcatgcgatgcaattcattggtctatgtttttaatcttaatcaaatccaaataaagcatatatttttatattcactttctttcgaatcgatttttatctcttgtattaaacttttccattgtttcattaaagctctctgtcatatctattcccattgaattcgctaaacataacaacacaaataaattatcacctaattctgctttaattgtatttgcttcctctgaatctttcttctttttttcaccataggtatgatttatttcacgtgcaagttcgcccacttcttcagtcaatctagctaagttagctaatggtgaaaaatatcctgttttaaattgtccaatatattcatcaacttcacgttgcatttctaccattgatttcatttctacgttctccttatattgcatttctaatatagtatatatcaatttgaagtctcatgcatgtttagtgcaatctactgactctagctaaactagatgacaagttgtttattttagaagtttaataattcagtttatataaatgtaatgcattcctaactaaattaaatcaattgaaattgggattataactttatgatacgtaccactacaataaaataatatagtgaataatctaccattagaaaaataagcacaaaaaaactagcaatcacacaaaatgtgattagctagttaataagtgtctaatttaagttaattgttaatctataagattaatcacttgaacgcgcaatcaaaataatacgtacaagctctgctacagcgacagcagttgctgcaacataagtcattgctgctgcagataatactttacgcgcatgtttgtattccttttcatttacaatgttcaatgccgtaatttgtttcatcgctcttgaactcgcatcaaactcaactggtaacgtaacaattgagaataataccgctaatgacattaaaccagcaccaatccataaagcagttgaaccaaatgcactacctatcgctgttaagataatacctaacatgatgatcatataacttaatgaactccctaggtttgcaacaggtactaatgctgctctgaatcttaagaaccagtatccttggtgatcttgaatggcatgaccaacttcgtgggctgcaattgcagttccagcaactgatggtctgtcatagtttgcaggagatagtgaaacaactttctttttaggatcgtaatgatctgttaagaatccttcacctttaacaacttcgacatcataaataccgtttgcatgtaaaatttctaatgcaacttcacgacccgttttaccactagttgatctaacttgtgaatatttctcatagttagatttaactttgtgttgtgcccataaaggaagcaccattaatattacgaaataaattatcatagtaaaaattgaagacaataaactcactctcctttataaatattttactgtcatttgccgtttttatcaaatcatttacactttaataatttgtttaattcaatataaagcaaaagtccaaaaacactcagacaacatgataatacaccaatttgccacacatgtgtagttataaaatcataatatggaaattgaaggtgaaaatagtcaatataatcattcaaaaatacccaagtcatcgctacaatgattccaatcatagaacgtttaaacctaggatagaagtaaattgcctgaacagccattatactgtgggaaaacattaataccaggccatttactgtaatatcaccttgttcaataataaataatatattcataataactgcccaaatcccatatttgaataatgttacaaatgccagtgcatcgataatactattttgttttcggattaatatcaatgagatagaaataactaagaataatattgcagttgggctatctggaacaaaaatcttaaactgccacggcgtatgacttaattgttcaccataccatatataaccataaatcatccctaatatattacaaatgaggagcatcattaaccaagaacgttgataaagtgtatattgccaaaatgtattaatcgtcatctgctaagtcctcaaattgattatgtttatttactagcttgagtgtatttaaaatttgcgttagttgataaaaacgttgcttttcattcatctgtaaacttaaatcaatattatgtagcaagtaatctattaataacgcatgtttatgccgatctatagacatactatttaaatcatgaagataagtttgatagctgggcgattccgttagttgagcaactattaaatcatctagcctttgctcacgctttgacacgtttgcgaagtgaatttgaatatcaaaagcacaattatgattagcgatataatcaaatatttcatttgtattcattaactttatattatgcttagtaaattgaattgcagaagcgtgacttcccacttctgcaatttctaatgtttcatgatgattaatttttgtatctacaaaatgaatgtttgccaacttcgtctcattcacttttatatagttaagtacccaaactgcaatacgcgacttaaatcgatattgaaaaagtaaatattcaataaaactttctttaatttgattgagtgtctctgacatcaaataccccattttaagattgcaatcttgataattcgtcatgccaattttcgttacttggttctagttccaacaattgatttaaaatagtaattgcttgttccttttgaccagtttcaattaaatagaaataataatcactcataaaatcaatatttgttttcatcgttggatatgctaattcaaagaaatgttgagcttctttatctcgctcttcttgaccataggcgaacgctaaatgccacatgaatgtaggatccaaatcttcttcatctacatatgttaataattcaatgattgcttcataatcttcttcattacgatataaatcgcttaaaatcaataaaggttcttggtaagcattatcaacctctaatgcttgttttaacaataatacaccttcattagcatcgccgtgttctatttccaaacatccagttgtatacattaactctttataaaattgacttagtcgtaatccttctttacccgtttcaatggcatctggataatttttttcattttcatataatgattgtaaatacaagtagccttgaatataatcaggatctttagaaagtaatgtagtcattattttaattgcttcttgagtgatgtcatttttatcgtaagaaatggcttttttgagataatcttctgaagtcatttcatcttcattaatttcatcgtataagcgaatcgcatcactatagttaccactttgtaaactacaatctgccatacgagagaataagtttacaccattaacttgatattcaccagtttctaaaacagtttcgtattcagaggtagcacgtaaatattgaccatcataatataacatttcagccaacgcaaaatggattattggatcatttggctctagttcaagtgcttcttgtaatttatcaatagcaacttccatcatattaatttgttgatataaatctgcttctaacatcaacttttcaggtgatggttcaacataacttaaatattctaacgcttcgtcagtttgattttcagacattaaaccttcaataaaataaatcagcaattcactttcgtctggatatttgtgatataacacgcggaatacttccaaaccttgtggcattaatccaaaattgtaaagtgtctctcctagaataaataatgcgtcatcgttgtcagtagttattgcttcattaacacgagagtctaaattttctagtttttgtagattgatatcgtctattaatttatagatatcttccattttatattatccctcattttctaaaagctttagttttggtaaaaatcctggaaatgatacatttacagcatcaaattgtttgattttgacaggttcacttgaaagtagagaagcaactgcaagcatcatccctattcgatgatccgttaaactatccactgttgcatttgttttaaattctgacggatgaataatcaatccatcattagttggttgtaattcaaaccctaacaagtttaacatatcagccgttgtatcaattctatttgtttcttttacttttaattcctcggcatctttaattgtactcgtgccaactgcttgtgtacaaagtaatgctattacaggcagttcatcaattgcttttggcactaattctccttcgattgttattggttgaagcattggtgtatattgaatacgaatagaagcagtaggttcagcaccagttgtttgattaaaaagttgaatattaccgcccattttttcaacaatatcaataatacctgaacgtgttggattgattccaacattatgaattgttacatcacttcctggtgtgataagtgctgcaacaataaagaacgctgcagatgaaatatcgccaggaacatgaaaatctgcaggtttaatgtatcgaattgcttcaggggttgtagtaattgacaacccttctgcttcaattggaatattaaagtgtctgaacatcgtctcagtatgatttcgacttaaatctaattctttaatgatcgtcgcttccttagaaaatagacttgcgaataagatggcacttttcacttgtgcacttgccacttccatcttgtaattaatacctttaattacagatggtttaatgattaatggggtgtaattgtcttcaattccttcaatatttgcattcatactttttaacggtcttaaaacacgatccatcggccttttacctatggaaacatctccagataagacactttcaatacctaaaccacttaacaaacctgccaataatcgtgttgtcgtaccagaattacctgtatacaatacttgatgtggcgtgttaaaagattgatatcctggggaagtcacaactaatttttcatcatcttctttgatttctacacctaacagtcggaaaatgtccatcgtacgacgacaatcttcgccaagtagtggcttatatatagtagatacaccttcagctagcgacgccaacatgattgcacggtgtgtcattgatttatcgcccggcacttctatttcgccctttaacggacctgaaatatcaatgatttgttcatttaccatttcattcacctacttaaaatatgtttttaattgttcacatgcatgttgtaatgttagttgatcaacatgttgtacaacgatatctccaaattgtctaatcaagaccatttgtacaccttgcttatcattctttttatcacttagcatatactggtataacgtttcaaaatccaagtcagttatcatgtctaaaggatagccgagttgtattaaatattgaatataatgattaatatcatgcttagaatcaaacaaagcattcgcaactataaattgatagataatgccaaccatcacggcatgaccatgaggtattttatgatagtattcaacagcatgcccaaatgtatgacctaaatttaaaaatttacgtacaccttgttctttttcatctgcaacaacaatatccagcttcgtttcaatacctttagcaatatatttatccataccatttaatgactgtaatatctctctatctttaaagtgctgttctatatcttgcgtcgctgattcaccattcaataacgcatgcttataaacttctgcatagccacttaatatttgctcaaatggtaacgtctttaagaagtctaaatcataaatcacagcagttggacgataaaatgcaccgataaggtttttaccttgctttgagttaatacccactttaccgccaacactagaatcatgcgccaaaattgttgtgggaacttgtataaaatggacacctcttaatagtgttgctgctacaaatcctgcaaaatctcctgtcgcacctccgccaacagctataatcgctgtattacgtgttacatgatgcgacaaaatgtattctaaggtttcttgatattgctcaaatgttttcgtcttttcaccagctggaataatgactttatgcacattttcatatgataaaatatcatcaaatttattcgcaaaatattgatttacatattcatcaattaacaagaaactttggtcaaattgatttaaatatgtgcctatatacttgattgcaccgtgttcaacatatattggataattgtttgaagggtatgttgtttgtaatttcatgattacacctcaattgttcttgttgttaaaactcaatatttaattgtctgcgctcaataatttgttgtttaagttgctcaatatgatttgattggaattcttccaataatgcttttgcaatttcaaatgctacgacatgttcgcagacgatacttgctgcaggaacagcacaactatcagaacgttcaattgttgctttaaagtcttctttggtattaatgtctactgaatttaatggtttatataacgttggaattggtttcattacaccattaacgataattggcattccatttgacataccgccttctaaaccacctaagtgatttgacccacgataatagcccaattcagtattgtagagaatttcgtcttgaatttcgctaccaggcttttcagctgctttaaatccttctccaaaacttacacctttaaatgcattaatactaacgacaccctgtgctattcttccatctaatttacgatcataatgtacataactacctacaccaacaggcatattttcaactacaacttgaactacgccccctattgaatcaccatcgtttttcgcttcatcaattttatcgcgcattgcttgtgcgatgccatcatcaattacacggacgtcatttcgatcaaggtttgctttaaatgtttctgaatcataaaaatctttatctttaatgccacctatttcaacaacacgactgtatatttcgatatctaattgttctaataaaactttgcataatgcaccaacagctacacgtgctgctgtttctctggcagatgaacgttctaatacatttcgtaagtcacgatgattatatttcataccgccaactaaatctgcatgtcccggtcttggcttcgtaattgtacgtttcatattttctcgttcttcgtcgcttattggcgcagcacccataatttttcgccaatgtgtaaaatcatcattagtaacaaccattgtaatagggctacctaatgtataaccatttcttacacccgaaacaatctccactgtatctttttcaatttgcatacgacgtccacgtccgtaaccgccttgacgcttaaacatttctttattaatatcctcaaccttaatttctaaatttgcaggtacaccttcaacaataactgttaattgaggtccatgtgattctcctgatgttaggtatctcatacacactcgctcctttcatacttccacgataacattataatatgttgttaatcttatcatattcattgtgcattcataaatgtttgttttcaagctcaattaagaaattgatttatatctctttttaaatgtcagaattatcttaatattaaacgaactaagattcattataatatattcacaacgagaaaagtattatgaatttctaatattgttagattgtttaaacaactatttgaaaatttaaaatttgttcgaacaacttataccacatataatcgtagctaaccactaataaataatatacaagctatatttctttatataaaagaaaatggactgatcatattttataaagttaatcagtccgtataaaaatagggctttgttatgaatggtcatcaatcactaaccacataacaaaacccttttttcttttattaatcagaaaggtttatatcttatattttattcgtataaccaagcatcacgtggtgaagcatagctagtaatttcattttcattaaaccataaattaatttcgcgttcagcagactctaatgaatctgaaccgtgaatgatatttctaccaacagttaaagctaaatcacctctaattgatcctggtgaagcttctgaaggattggtgctgccaataatatgtcttgatacattaactgcatcttcaccttcaactaccattgcgaacactggtgctgatgtaataaatgaaattaaatcattataaaatggtttaccttggtgttcaccataatgtgtttcagcaagttccattggtacttgcattaatttaccaccgacaagttttagtccttttctttcaattcttgaaattacttcaccaattagatttctttgtactgcgtctggtttaatcattaaaaatgtacgttccactttatgtatccccctgtgtttaataggtttatgtatattactattatatattaacaggttggtaaagcgctttcaatacttttcataaatactatgtgtttcttgaacccatttttttcgtcaaacttaaaagtagtgatttcggatgtccatctggtaactcagaaatcaaatccaaagctttacttaaatacttcgaacttactgacttagcctcatcgatgctgtcagattttctaatgatttggatacattcgtcaaattctttgcgttcactatcacgacgtaactgttcgattttcagtttgaagtctgggtttttacgcatttctaataaaatcggtaacgtaatatgaccattaagcaaatcacttccgaccggcttacctaatttcttttcggtacttgtgaagtctaatacatcatcaatgatttggaagctcatacctatataatgaccaatcattttcaattttcgtacagtctctttatcagattgagatgtaattgcaccaacttcagttgataattgaattaacagtgctgttttgcgattgatacgtcgtaaataattgataattgtctgttgactgttaaattggtcttgaaattggaaaagttcccctctacaaacatcaacgatagattcagatattaattgatgtacacgattatctttaacggccattaagtgttcaagtcctaatgccaataaaaaattcccagttaaaatagcagttgtctgatcccatttctttgatatggttaacttgcctcgacgcttgtcgcttttatcaataacgtcatcatgaacaagtgttgccatatgaattaactctaatgcgactgcaacttgatacgtttgttcagacgtttgttcatctttgccaaattggctactcagaattacaaatgctgggcgtactcttttaccaccagaagacaataagtgtaatgatgcctgttctaatacagaatctttactttttattgccttttcaagtcgttgttccactttcttaatttcattgttcatgtttaactttgccacgttaatcacctttggtattatctttttctttatagccaaggtgcattgcagcaacgccccctgtaaaactacgtactcttacatttatgaaatccgcttcttcaaacatgcgcttcaactcttcttttccaggaaaattaaacgtagattgctgtaaccattcatattcttcttttgattttgcaaataattttccaaaaatgggcataacaaatttaaagtataatgcatacatttgtttaaagactggcaaagttggttggctcgtttcaagacataccaccataccacctggtttaagtactctattcatttcttttaacgcgactaaatagtctggaacattccttaatccaaacccaattgttacataatcaaaagaattgtcttcaaacggcaattccattgcatcaccatgaacaagtttaacattttccattgaagcagttttttcttttcctacttctaacatattctcactaaagtcaataccagtaacttcacctgttggtcctacagctttgcttaatgcgattgtccaatcaccagtaccacaacaaacatctaatgcttttgtcccttttctaacacccatgtctttcatgacgcgttttctccatactttatgctgctcaaaactaataatattatttaatctatcatatttttttgaaatattttgaaaaacgcgatgtacttgctctttatttgctttattgtcagccatgcttaattacctctactttttaaataacttttttggatatcgtgtaagtaatgctttacttcactttgattatatttcttgaagtatgatggatagtaatcagacatatcttcaaataaataattatatatttccgactcatcaatattgataccgaaatgagataacgtaatatatgggaaaagtgtttcaatttttactattgcttgagaaatttcataatcatttaaagcttgatgatgtaatgaagatttcaattcattaatttcaacaattgctttactaatttcattttgaaatgataaatcattgatttctgctagtagcgtataaaaatgtgcactaattaaatctccaatcaaaatggaatgtttagacaaatgattatatgtaatgtcatcaaggtgtctcattgatgtgtcaattgtgaggcatgctactttggcaacatctggaatatcatatgaatcaagtaacttacctaaccgatgattaatattaatggattcatattctgatacaccctttaatctttcttctatttgtctttccaatttgctaacagttgtttccatgtctacacctcacgatattatcactattcatattaacattatatgtaagaaattaaaatcttttgaagcattaagattacttatcatttttaaatttcaatttaaactaacagtaatttatgtagcttttgtaattctcataataacccttacttcatttacattattcatcattttaaataacgtaaaatactatagtagacatggttaccttttaagtaaattcaacgctaacaattaatctcattattcatatgtatattttgtagttgctatttttatcaaaactattatgtcatgtaatattttgaacgcttaaacaatgaatgttccaaagattaaaaatttagaagaacaatacaatttctgtacaggttgtacgtattaaaagcaaaataaaaagcccttattcagggctttttaagtaaaattattttacagcatcttttaatgctttaccagctttgaatgctggaactttacttgctgggatatcaatttctttaccagtttgagggttacgacctttacgtgcagcacgttcacgtacctcaaagttaccgaaaccaattaattgtactttttcacctttagcaagtgagttttggattgattcgaatacagcatctactgctgaaccagcttcttttttagttaaatcagcttgctctgcaactgcattgattaaatctgttttgttcattagacattcacctcctgaggtttgataatgatatgtttatatcattatggtaaaactttaacacaagcattacataaatcgcaatcatttatgtggcaaaaacgttgaatttaagccatttctattcattttgcgtaattattagctgtatatgtgtaataatacacattttattcagattttttatcgcgctccattaaatcttttacgcattcttttaccgaaatattttcaaataatactctatataatgcatttgtaattggtatatccacatttttttctttagctaaatgataaacggatttagttgtataaataccttcaacaaccatattcatttcagataatgcttgatccattgattcaccttgtccaagcttatatcctaatgtgaaatttcgagaatgtgttgatgtgcaagtaacgattaagtcaccgataccacctaaacctagaaatgtcataggatcggcacctaatttttcacctaatctgctaatttccgctaagccacgagtcattaatgcagcttttgcattatcaccgtagccaattccagctacgataccacttgctactgcgatgatatttttcaatgcaccaccaagttcaacaccaatcaagtcatcattcgtgtacacacgtaaataatcattcataaataaatcttgcgttaatttacttacatttttatcttttgatgaagcagcaactgtagttggttgcttgactacaacttcttccgcatgacttggcccggacaacacgccaatacctgcattatattcaggtgaaatagaatcttcaatcatttctgacacacgtttaaatgtcccattttcaatacctttagcaacatgtataaaagtctttttagatgtcagcttatcattaatttgagtagcaacttctcgcattgctttagtaggtaaagccattaagtaaatatctgcaaattgaattgctttggtcatatctgaagtagcgatgatgttaacgtctaattttgcgtattttaaatactttttatttgtatgacatgtatttaattcatcaacagcatcttgatttttaccccacatcaaaacatcatgtccattttctgcaagaacattggcaagggctgtcccaaaacttcccataccaaaaacggtaattttagtcattgttatcccccaatcgttaatttctctttcgagctataatatgaattggtgtaccttcaaaaccaaaagcggcacggatttgattctctaaatagcgtttataagaaaaatgcattaattctacatcattaacaaatacaacaaatgtcggtggttctatagcaacttgtgttgcataaaagacattcaaacgtctacctttgtctgttggtgtagggttcatggaaattgcatcagtaacgacttcatttaaagttgaactttgaacacgttttttatggttttcacttgcttcattaatgtaagggaataatgtacgtaatcttgtgcgttctttagcagacacaaaagcaatttgtgcataatctaaaaattggaattctttacgtacttcatcttcaaatttcttcatcgttttactatctttttccacagtatcccatttatttacgacaatcacgactgctttaccttgttcatgtgcataacctgcaacacgtttatcttgttcaataatgccttgttctgcatcaataaccactaaaacaacatttgaacgttcaatcgcttttaaagctcttaatactgaatatttctcagttgattcatatacttttccttttttacgcataccagcagtatcgattaaaacataatcttgtccatcataactatactctgtatcaatagcgtctctggttgtccctgcaacattagaaacgataacgcgatcttcacctaaaatagcatttactaaacttgatttacctacgtttggtcgtccaataatggatagtcgaattgtatcttcatcataaggatcttcttcctcttcaccaaaatgagaaacaactgcatctaacaagtcaccaagacctaaaccatgtgaccctgatatcggatacggttcaccaaatcctaatgaatagaaatcatacacgtctgtacgcatttccatattatctactttgttaaccgctaatacgaccggttttttagatttgtataaaatttgagcgaccatttcatcgctttgtgtcaatccttcacgcacgttaaccataaaaataataacatccgcttcatctatggcgatttctgcctgcgctctaatttgtgtttggaatggtgcatcaccaatttcaataccacctgtatcaataatattgaaatcatgtgttaaccactcacctgaagaataaatacgatctcgtgttacacctggcgtatcttcaacaatcgaaacacgttctccaactattctattaaaaattgtagatttacctacattaggcctacctacaatagctactataggtttagtcataagctaacttcctctctttcttatatctttttaataatatcacatgagactgtgtattcaaaatgagtttattactgtaatgataaaaatcagcacttaaaactttatcttataaaacacttagttaaatttgtccacgttatcattccgaatatatttggttacataatcaaaaccacccgtgtgaacgggtggtttgttctgcggctataagccttccttactggccagccctaaaagggcactgacaagtcagccaactgcactactatttcagcaaccctaaagggttactcttttttctttctttttctatttttctctccagtgaaaggatctaaatattcttccattgagatttggtctgcaacgatatcctcttgtaattgattacgaatataattttcaatcacttttttatttctacctactgtatccacataaaatcctttacaccaaaactttctatttccatatctatactttaagttagcatgtctatcaaatatcattaaactactttttccttttaaatagccaacaaatgatgataccccaagtttaggtggtatacttactaacatatggatatgatctttacatgcctctgcttcaattatctctacaccttttctttcacataattgacgcaatataatccctatatctttttttatttttccatatatcacttgtcttctgtatttaggtgcaaagacaatatgatacttacaattccattttgtatgtgctaaactgtttgtgtcagatgacattaaatagcatctcctcgtgttgattattttggttggctgaccaatatttattctagcacgtagagatgcattttttgtgacaatggtagaaccttttctgaaccatacgcatagcgtatggttttcttttcataaaaaaatactccacatgcaatcataaacatgtggagttgactattaaatattaaattatagtttaagatttttaagtttatcaccaatcatatcgccaattgttggattatcttcttcttcgctttctaagtacgccttagtcgtagaaggatcactttcaacaacatcttcgtttggtaatgttgctttaatagatagtgatactctttcattctcttcatcaatacctaatattttaacatttacttgttgaccaggttctaacacttcacctggcgtaccaatgtgtttgtgtgcaatttcagaaatatgtacaagtccttgtacacctggtgcaatctcaacaaatgcaccaaagtttgccaatcttactacgacaccttcaatgacatcattttcgtggaattgacctttaatattttcgaaaggtgttggtaacgtatctttgattgataatgaaatacgttctgtatctctatcaatagatttaattttaactttaacatcttgaccaattgaaactacttcttctggtgtttgaacatgttcgtgagaaagttcagatacatgcactaaaccatcgacaccgccaatgtctataaatgcaccaaattgagttaaacgcgctactttaccatcaataacatcgccttcatttaaagattgtaataattgatcttttttagcatcgttttcttcttgttcaactgctttacggcttaaaatgactctattattttcaggatccaattcttcaactttaatacgaattgtttgtccatcaaacacagagaaatcctcaatgaagtctgttgaaattagtgaagccggaacaaaacctctttgtcctacatcaacaaccaaaccacctttaactacttctgttactttcgcttcgatgatttcattattatctaatttttcttgtaaataactataagacttctcagtttcaagttgtcttctagataagatgtaagctccagtttcattttcttcatcaaactcaactttagtgacatatgcttcaacttcgtcgccctcttttacaacttcacttgggctatcaatatgatgcgtagatagttgactaataggaataatcccattaaatttaccaccgttgatatgaacaacaacttgcttgtcttcaacttgttgtacctcgccagtgactttgtcaccttctttaatatcgttaatcattgattcattgaattcttcagtcatcttgtttgcctccttatacactacatatttataacatcttataaactgacagaattgtcaagaaattcaacctttattacatttagtaaattagttgtatccataaatatgtcacttaatctcattctgtgtattatttggacatatatttattacaaccatatattcaaacaagtaataaagtccgctatgtttatacatattttttgtataaaaattagcatagctcactattttgttttataagtctgtcatttcattgttctctacaagatatattatagtaaaattttatacttttataaaacaaaaagccacgcaaataagcaacttttacatttgaatagtaagaagaccgtatatagtgcatctttctcgaattattacataggacattttttgtgactaaatcagcttcttttgcaattcttggatttgtaacactcattttcttaccatttgtaaaatgctttacgcatgtaatgaattatttttggaattctaataatttatctatattatttctgtttactttttgaaaaacttacacaattgactgacgcattaacttttaccaaaaataaaaaggcaactttcattcatcgttgaataaaaatcaccttttaatttgagtaaatcattatcagcacattcattttgtatatgcgttaagcgttgcacattacaaatagatagttatgacttactagattattgaatttgactcaccatcgctaaaatttcgtcagtaacttcttcaatcgtcttgcctgtcgtatctaatgtcactgcatcatctgcttttcttaatggcgatatttcacggttcatgtcatattgatcacgtgcttcaatatcacgttttaaatcttcaaaatttgattcgatacctcttaattgattatctttatatcttctttctgctcgctcttcaactgatgcaatcatatatacttttaaatctgcatctggtagcactacagttccgatatcgcgaccatccattacgatacctttttctgcagctaactctttttgctttttaacggcgaatgaacgtactggctctttagatgcaacgtatgaaacatgttgcgtcacatcattatttctcaaaaagtctgttacatcttcgttatctaaaatgacacattgacctttatctgctttataagttaaatctaatgttgtttggtcaactagttttgcaaagtcctcagttttgtttaattttaaatatttgtatgttaatgcacgatacattgctcctgtatcgacataaatcattgatagttcgctggctacacgtttcgcaattgtactttttccggcagcagctggaccatctaatgcaatattaatggctttcatgcgtcatttcccttccttgtcgttttatgaataatattttatcataattaggtaaatgaaatataggaggaaatatatgaaacatctacttgttattcatactggtggcaccattagtatgtcacaagaccaatctaataaagtagtaacaaatgatatcaaccctatttcaatgcatcaagatgtcataaatcaatatgcacaaatagatgaattaaatccttttaatgtaccatcacctcatatgacaatccaacatgttaaacaattaaaggatattattttagaagcagtaacaaataaatattatgatggtttcgttatcacgcatggtaccgatacgttagaagaaactgcctttttacttgatttaatattaggtatcgagcaacctgttgttattactggcgcaatgcgctcgtctaatgaaattggttctgacggattatataattatatttccgctattcgcgttgcctctgatgaaaaggcccgtcataaaggcgtgatggttgtatttaatgatgaaattcatacggcgcgtaatgttaccaaaacacatacgtctaatacaaacacatttcaaagtccaaatcatggtccgctaggtgtattgacaaaggatcgtgtgcaattccatcatatgccatatcgccaacaagcattggaaaatgtcaatgagaaactaaatgtaccattagtaaaagcatatatgggtatgccaagtgacatttttagtttttatagtcgtgaaggaatcgatggtatggttattgaagcgttaggacaaggcaacatacctccaagcgcattagaaggcattcaacaattagtatctttaaatatacctattgtgctagtttcacgttcctttaatggtattgtgagcccaacttacgcatacgatggtggtggttaccaactcgcacaacgaggttttattttttctaacggtttgaatggtccaaaagcaagattaaaattattagtcgcgttaagcaacaatttagataaagctgaaatcaaatcatattttgaattataatgattacgtaacataaaaaggtctatgtacaataattagtcatcaacctcatttgacatatcatgaatgtcagtcgttgtaaaactaagttatttagtacatagacctttatttttatgattctaacggcgtttgtttcttagctagcatgctttgagcaataatgccaccgtggaacttaccattttcaataaaaatggtattcgcatcgttccctgcagcaatcacacctgcaatgtagcaattttcgatatttgtttcgtatgtttctttattatacataggcgctgttccaaattcatttgtattaatttgaatgcctacagattttaaaaattcataatcgggatgataaccaatcatcgcaaatacataatcattgtgtattgttttactttcaccatttacttcataagtcacagtatcttcagttatttgggtaacattagcattaaattccatgtcaattttttcatgatttactaatgctgtgaaatttggaagtatccacggtttaattgaaggcgaataatctccaccacgatatagaaccgtcacgttagcaccagctttttccaactccaaagcagcatcgatagccgaattcttaccaccaataataacaacatcttgatcaaaatacggatgtgcttctttaaaataatggaacactttaggtaaatccgcaccttcaacttctaatgtattatgctgaccataatagcctgtcgcgattgttaaaaatcgacattcataaacatctttcgtcgtagtaatagtaaatttattattcatttttttaacagttaatacttcttcaaatgcatttacttttaattgatgatgttttacaacttctcggtaataaactagcgcttgattacgtcttggtttactttcttcaacgataaacggcacgtccccaatacttaatttatcacttgatgagaaaaatgtttggtgagtaggataattgtagattgattcaacgacattacccttttcaataattaaggtatcaataccttttcttttttgttcaatagccgcacttaatccgcatggccctccaccaattatgatactttcaattttttgcattgtttcggcctcctttaatcccaaactattataacagttcagtgattgatgcgctaagactgtgcttgaagatttatgatatatttttgacaatttgtttaatgtgcatagagaattgttagccatggagttgaataacactacaatttaatatgttgatttattttttattcatccttgttaaatttgttgattgtggtgttttatctttttgatgactatgtaaaaagtttaattgatatgccaatatccatgtccatacttaattaaataaaaaaaccgctacatacttataagcgcaatttaagttctctataatatttagagaaactttataatatgcacgtttgtatatagcagttcagttacaatttatatagttatattatggaataacgatttgttgaccgtttctaatattgttaccacttaaaccattggcacgtctaattttttcaacattttccggtgaacctgaaccgtagtattgaattgcgatacggtataagttttcttgaccattcactgtatgtctttggccaccaccttgacgttgttgttgctgttgttgattttgattagcttgttgttgattttgattattttgtgcttgattgttcgcttgattagtgttgttttgatcattatcagattcatcttttgtcactttgtcttgatcatcttttgatttatcactgtctgtagattttgatttatctttagaagcgtctttagatgtgtctttatctttactttcatcagcattatttttatttgtattcgcgattttattttcttttgtaccattattatgattgtttaatgccatgcctccaaatatcgctaatgcaccgataattagtacagctgcaattaatggtaacaatactttggccatgccaccttttttacgttctttatctctgtcatgatggtcatgttcatcatggttttgacttgcattgttagaggcatgtggttttgaagcggcagaagcacttttacttgctgcgcctccagccaaacctgctgttccagcaccgattgctgcaccttttttaccactatgatgatctttagattcatctttgtcttgcttaacagttacatcatcatgtttatcttttgatgtatttgcttggttagcacctgttgcaaaatatggtttaggttgctgagattgttcagattcactcttatcagaaactgttgaatgctcagtgttattttctgcatctttaatagtctcgtgtttatcattgtcttcgattggttctggatgtgatttatccattgcaaaagcattcttattataatattcctcttcatgttgaggtgtactgtcttgatggctaggttcttgacgttcagtactgtgtgatgattcgacttgacgatcatctattgtgccagcctcattttgaacattgtcttcagatgtttgtgattcattgtgatgttgtttgttatgatttgttgctaaatcacggcgtctttttcttctttgggcatttcttggtgggaactgttgctccgtattctctattgtatcctgatgttctaattctgattggtctttttcaacatcttccgtatggtcttgatgtgaatttgtgtctatcgattgacgatttttttcaaagtcatctttaaaattattagacatagccatcttcctttctattctattacaatgattttacataaaatatacccttatgacacaagtttatgtatatttttcaaaattatttcaatcatttttcaattgtgtatacactaattatagcttgtcaattttcttttagtaaagtaatactatctgagaaataaattttgcaacttttcatcaaatccaatacttctaattaccttcttcttatttaaaattgcgatatcagttatattagaatcattgtcacaacatcgatcttgtgccggtggatattcactgaaaaattctaataaatacttccgtctacattgatccaatttgcaatagccaatcatgcgaaagaatcctaattgctttcgtttaaacgattgcttaaatatttgtttcaaggcgccgatactgtagaatgaatgcaacgttgtcaaaacgtcttgtttatcgggtgctaaaaattctcctatttcgaaattttgtacatcttcttctgttatcatatctgcaaataataacgtttctaaaatatatttatcgtccggttgaaataaactaattgcctgacttagttcaccatcgcgacccgcacggccaatttcttgaatgtagttagaaggacttgttgaaagatgaaagtgaatgattgtgcgaatatcttttttattaattcccataccaaaagcactcgttgcgactataattggaatatcattatttaaaaattgttgttgaactgtgtgtcgctcttgataattcatatcaccatgataaatgccagtaagaaaacctgaatcataaataagttgcgctaaattcagacacatctttttcgatgagacataaataatcgttggtcccgactgttgtagaaacggcagtaaccactcaattttatcttcatcatcattaaaattaagatgcttaaagcttatgtttgggcgattcattgtagttttaataacgttgaattgaatcgctaacatttccatcaaatcatcttgtaaatgcggtggtgcagttgctgtcaatgctaagacaaccgcttctttaaaatgctttgttacttttcctattagagcataatgtggtctgaaatcatatccccattcagataggcaatgtgcttcatctagaacaatcatgccaaagtctatcatagatattaatttaaaatttgacggttgcaggagaaattctggacttagaaagatgaagcggctatgtcgtaaacatttaatattatgctttttctcaatttcatccataccagaatgaatacatgttacacgtttttctccatttattttcaactgcataacttggtcatccattaaagatattaacggtgagataattaatgtcggcttacctgataaatacgtaggtatttgataacacaaactctttccacttccagttggaagaatacctagagtgtgttgttgagacattatactttctataatttcctgttgtcccggtttaaaactctcgaaaccaaatttgtttcgtaaaatatcatgcaacattcagatcacctctttcaaatccaacgattaatacttttaattgaaaatatgataacgtgtcaaattgttctttgtaaaattttaatcgttcgccacgatgttgttgataaaaattcaaaaattgcagttgatcttcttgttcaacataatcatcgtaattagacatgtaacctttgattaagatttcaagcacatgatcttcgatagtattgattttaacttgttgttgagccgctatatcttccatcgtgaattgttcaagcaatcttgtataagtaatataggtttgatttaataatgtaggtttcaatattatttttgataaaatagtatattctccactttctaattcaaacatcattgtcactaaattattcatttcgaattcaaacaattgctgttgagatagtttttctattaaactaacttgctgtctcgtatacattggttcatcatagccttgcaaataataatgtaagtaacatggcccttttaaagttattgctttaaacaagttatgtagttcattttcaaaatcaatttgtaattggttttctttaatgtagttatagacaatctttacagtttcttgtatcttattattttgagagattggtacaaaatgaaaaacatgttgtttggtattagacatggtttgcactaatagttgaattgcttgaaatgtttgccccatactttcaaatgtatatctaggatgcaacatgatttccatttcagcattaaattcagttatattttctaaaaatagctcaaaagacggatattttaatagtggtaaactgtgatataatgacaactgttgttgactacaagcgtcaaaaaaggtttggtgagatttctttccaactaagatattgtaaatacttttatttgttttatagttaaatgtttgttgtaatgctgtttttataatgtgttgcaagtttaaccctcactctgtaaaacggataatttgaaaataaaaatgatgctgtctaaaattttagtcacattactattttagcatttttatcaaaggaggcgaagacattggcaaaatatacaatcgttgatatggatacttgtattgcatgtggtgcatgcggtgcagcagcgccagatatatatgattacgacgacgaaggtattgctttcgtaatccttgacgataaccaaggtactgcagaagtacctgaggaattatatgaagatatggaagatgcaattgatggatgccctacagattctattaaaattgcagacgaatcatttgatggggacgctttaaaatttgaataattgattttttagacaaatgttccaaagaaaaagcaggcaagctatcgtttattgatagtcacctgctttttattattatgtgtatattattttgctttaatttgattaaattcttttcaagaaattcgcaagccttctatatagtaaaataaatacaatagaaatgacgatacctttaataatattgaatggtataattcctgaaacaatgattactttaagattatttgcgatatcagctaagttaaatatcataccgtacaaaggtaatagaacgaaatagttcaagatactcaacacgatagtcataacgattgttgcaatgattaatccagtaatcaaagattttgttgaacgtttatttttatagatggcgtaagcagttaataagaaacttgcgcctgctaaaaagttagcaaatggtccaactggatcgcccatactaaataagtagttcaataaatttttaaccagtgcaactacgataccggcaactggtccaaacgtaaatgtagctagtagtgacggtacatcactaaaatctaaagttaagtatggtggcaaaaatggtataggaaacttgataaaagttaatacaaacgcaatcgcgctcaacatacttattgtgataagacgtttattttgttgcatattcaattttctccttccattcatctcgtaagaataggaggattattgcacaacaaaaaacctccatcttctcccatccagactatactgtcggctctagaatctcactagatcagccactaatatgatacatactagcaggtcgcaggctttatttactgccggttgggaattgcacccgaccccgaagatgaattttacattattaaatttaattctcattaattttatactatatatcacaaaacctcaataactatgctttaattagatcatagttacgtaattggagaatgtttcattggtgatttgcgagcattgtttggaatgttgtttgtttgattgtttttttgagatggatttagggacggttttttgaacctacctttttattgttattagtttaatcattcgtgttagttttttcatgattaaatacacctacttctattacatccttcttactataattaggtcttgttgtatttatatatttattagaaatttgaagagaaacattcaaatcatgaggaatattctttttcttttttagtacttcagaaaaatcaatcatctcgtctattgtattatctttagtaaaattatctttagtactaaataaagttgtaacaacatatggacgtgatttatctttaagttgtttttttgagtttctcataccgtccctaaaagacttatcatcctctttgattaagtgttgaaaataccttttatattcatctaaagtatatggaattgcagtcaaataataatactcatttctaaaaccactattctgcgttttcataattgcattttcagtataaccagtatatttatatttacttttatattcttttaaaacttctgttaaattatccaactcttccttatgtgctcgatattcaaagccactcaacactgtaccaactaaagtactcatatcatcgcctttatcctcacttcttaatgagctatcactgtcaataattgatttgtcaaatggaatactcgcattaaatacgatatcgtggtcatcacaatgcacgtatacttctacgccgtcgccactacctacaacattcgtagctttaacttttagaccgaagttatccataaaaaattgttcgccacgtttagcaattttatctttatgcttcttcgcaaattcaatcgcatctttttctgcaggtggttggaagccttgtcctacatattttgaagcttccatttcttctggtactgattttgtttcattgttggatttgttattggtagttgaacatcctgatagcagtattgttgctattaagattagtttagttcttttaaacatagctcatcacccatttatgtgtttgtaaaacttttatgtttgaaaaaactacttattttcaatgaaaacaagtagcttttaataaattaattagtatactgctagtttttctaattgctctttaacttgaattaagtttgaacgaattaacgaggcagattgatccattgtttgaatagcttgtccttcattttcgttcaagccattacaaacaacttcaaactgttgtgccatttgatcaagacgagcatgagcttgtgtgtttaaaataaacatatcgtcataatgtgatggttcaaaaatctgattaacaattaacggtttcatatttctaactatatcatctaagtgattttctaaaatcggcgaagctgcctttaaatcatgtaaaaaatctgtccattttgttaggtttatttttaattcttctattgaattttcaaattgttttcgatcaatagaggattcttttaaaccatcaatgattcttttttcgtataacattgtaattaataaattaagaccatctataattccttttataatttctgttgtgttatttatatatcttactaactctttgaaattttcattataaactttttgaatataatcagataattcttcaacagcattatcaatatgattttttaaaatagtcatttttcttgataaatattttgaaaggttaactttacccgaaaccatatgttgaccattataattgatatttaggtttccatccataatagtagcatcttgataggacatgatactttttatatcagcaatttgattaccataaatgtcattttgatttttaattagaacgatattttcgctaacgatttttaaatgtttcatcatttcttccgtcacaccatcttgtaaatcatgatctaaatttttaaacatttttactaatattttatcgattgagtcgtgaattctttctattccactctggagttgactatcgaccttattaataccccactttaacggtttcaagtttaaagctggaactaaaattgcaataggtccaattttatccataaaagaatctatactttcaaataactcattctttttagatgtaatgtctctactcatattttctaaaacatcaatttcaattacattcttaaatttttgttttaacttatgctttctatctccaaaataagaattttccgactgagatatattaaaactttcatttaaaaatgtcacacattcttgtaacataatgcttgtttcccctgtaacaagttggtataaatcacctaatttctcaatatctaacttaatattttcccctttacctgacctcgctattgaatcccctgtccaaacatttattggaattctaccatccatgtctagatttatatttataacctttttcacttcttttccatttttaatctctgtatccttgaccgattctattttatgaacaggtatatccttatatttattagttttcgaattgaattgccttttaaaaccaagatgactatcaattaatccatttaaagttggaacaccatctcttatattaattcttttacctggtatttctttcgcaaatggatcttgtaaccatgatagtaagtcatttgtactatgaaaactaatcatatttttaaattttgaatttttatattgttcccatgaagcatatggtaacatagcaggattagaagcaactatattttcattttgatgtttggccccatgatattttgctcctgcgccaccttcggaattaccaccgtcagctacaatgcttttgtgcttgtaatttttaggatttgtattatattttctaagaaattcactttttgataatttatttgcatcttctatttttttcttatattgatttgaaaattcatccgcttgattcaaatattgtgtggacatatttgaatcattcattaatttgatgttttgtatccaatcatcaccgatatttttagacctaagtgggtttttaggattaattgcctcattagaagttccttgatagacgatagtctgttggcctgttggtttacttttatcatctaacaactcatatattttaatatcagcagcaccattcaaattcctatttttatcatcattgtaactatctacttgcataaatcgttttccattaactttaatttctttatttgtatttatatcttgataaacccagtaaccacttaactcagttaaatctctatcattaattttattcatctttacgatacactccatattctattggatcattatcatcataaaaggcttttttagtattaatagtaggctttcctatttgaattgtaattgtagatttttctggcttatttttaaaattatataatttatcactcagttcaattacatcatcaactgtattatctttagtaaaatttttctttgtactaaacaatgttgttactgtatctgtattagcagcgtaattcacttcttttctggcttgttccattccttctttaaattcttcatcatttttatgaatcaatggttcgtaatacttacgatattcttttaagcttcttgacgagtaggtgatataaaaatattcatttttatatccgacattttgcgtcttgtttattgcttcttttgtaaagcctgtatattggtatttctcttcattatctttgaaaaatttatataagttatcatacttttctttttgcgctcgatattcaaagccacttagtactgtacccaccatcatactcatatcatcgcctttgtcctcacttcttaatgagctatcactctctattatcgatttgtcgaatggaatactcgcattaaatacgatgtcgtggtcatcacaatgcacgaatacttctacaccgtcgccactacctacaacattggtagctttaacttttaaaccgaagttatccataaaaaattgttcgcctcgtttggcaattttatctttatgcttcttcgcaaattcaatcgcatctttttctgcaggcggttggaagccttgtcctacatattttgaagcttccatttcttctggcactgattttgtttctgtattcgtgtctttacttgattcattttccatcgtggaacatccccctaaaattaatgtcgtagctaaaactgatccaatgaattttttcatatgacacctcgaataatttaattattacaatatatctatattttaccctatttttataatcaaataaataactttatcaaactttatatttttatataaattagtaatatatttaatagttgattttcgcaaaaccctaaatcctaatccacatacaaaattccccacatcaataaaaaaacgcatgctataaattagagtctctaatcaataacatgcgttctgaaataactatattcaattttattctggttttggtagtttaataataaatgttgtgcctttccctaattcgcttttaacatctatggaaccaccatgctcttcgataatcattttacaaatgaacaaacctaaaccggtaccttgtttacctcgcgttctcgctgcatcaactttataaaaacgatcaaatacttgttgtaaatgttctggtgcaatgcctgtgcctgtatctttaatgtataaaatatcttcgctttcattttcagcacaagtaattgcaatttcatctccaggtttcgtataacgtgatgcattatcaattaagttcgttagtacttggtccatgcgatccatatcataactccaaacacgcttcttacaataattaaaagtcatatttagacctaaatcatcagcttgttgacgatacttaattttcatcttatctagtaacgctgcaataggttgaatttctttatttacggataacccttcagcatccatgcgagcgacatttaacaattcattaactaaacgatttaaacgtttcgattcatcaaggacaatggcaagcgattcttttatttcatccggttctgtaacaataccatctacaattgattcagtataaccttgaagtaatgatatcggtgtacgtaattcatgtgatacattagcaatgaaatctttcttcatttgatctagattgtgctcattagtcatatcacgaactgtcacaacaacaccacttttacctccctgttcaatcttatcgatatagcttgtagtcacaacaaagaatcgtgcattcatttctaaatcacgcatttcagtttgttttgatttaaaagtatcttcaatttgtcttaataagaaagctttagcatcttcatcaatattgtccataatatcattcgccatcttattcgataagataatttgtcgactctcattaatacctaggacaccttctaccatagagttaattaagctgtctctaatatttttagatgtggataatgcgtcgacatgctcttcgatttctgtactcatctgattaaatgcctgcgataattgaccaatttcatctttcgttgtgacagaaggtttataagagtaatccccttcagatacacgtgtagcttggtctcttaaacgtcttaaaggttttgtaattcttgacgataagaaaaacgcaaagactgttgtaattgttaagaaaataacagccgtaattatagtgataatcgtaatagcattatttgtatcttcgattgatttcaagtctttatatataaagactccactatatttgctatgactattcttctgtgcttttgttggatagcctaacaaaatatatgtttgagatgaacccttttctttaatcgttacatttcgagtaacagatttacctttatcaaacacatcgtcaaaatggtcgttgttgactacttcattcaacatttgctttttaatattagaaagtgaagccgttgattgacgatgtttattatttataatcatcaacccaccaggattttcaattaatgtttgactatattttattgcttcttctttattatgtgattgttcgaccagtgaacttatacgtctagcatcttctcttatggcattttcagtttcttgtgtgaaatagtattgcataaaagtaattaaagcaatacttaataaaattaaaactgtcgtcactattaaaataatagttaaccacagtttaattacgacactatttagccggctcatcattagatttaacctcaaatttatacccaacgccccagactgtttgaatcatatgcgcagcttcgctagacacacgatttaacttttctctaagtcgtttaacatgagtatcaactgttcttaaatcaccatagaattcataatgccaaacttcttttaataattgttcacggtcaaatactttatttggtgttttagctaaatatattaataattcgtactctttaggagtcaaattaacttcttgattatcagcaagtacgcgatgtgcatcattatctatttctaaatgtttaaattcaatcacatcacgtgcgtgaggttcgctttgttctacagttgtagattgcgttcttcttagaagtgctttaactcttaagactacttctcttggtgaaaatggtttgacgatataatcatctgcaccagattcaaaaccttcaacacggtttgtttcttcacctttagcagtcaacataataatcggtgtttgtttatgttcacgcaatttagttgccacctggataccatccatttcaggcaacattaaatctagtagtatgcaagcataattattctccattgcaagttcataagcctcttggccattacttgcttcatggatttcaaaagattctctttctaaatacattttaagtaatcttctgattctatcctcatcatctacgataagtatttcgttcgacatacaggtcatacctcccacacatgcttttctttacaaaagtattatatcacaggaaagcgcatacagttattaaaaacctaaaattttgtgaaaaaattctcaaactttgtgataaatacatattttatttaattatttcccatgttctgctaaatgacgcatcacctttacttcatgaggcgtcaatacacgtccttcaccagcattcaaaccgacaacatttaaaggcccatattcaatacgagacagtttcgtcacttgatgaccaaaatgttcgaacattcttctgacttgacgattacgcccttctgtaattgtaatttcaaccaatgttgtgtttttatctttatcttgtttcttaactttcacttcagccggttgcgtcataccatcttctaattcaatacctttttctagcgctttcacttcttcacgcattaaatagcctgttaattttgcgacatatttcttcttaatttgatatcgaggatgtgtcattaaatttgtaaattcaccatcatttgtaagtaataacagtccagaagtatcatagtctaaacgaccaacaggataaatacgcgcttcgatatctttaaagtaatctgtaaccactgtacgtcctctatcatcagatacacttgttatcacttgagttggtttatggaataaaatgtaaattttgtcttctagttctattttaataccttcaacttcaatcatatctgaaggcttcacttttgttcctaattcagtgacagttgtaccattcactttcacttttccttcagaaattaaagtttctgctttacgtcttgaagtataaccgctatttgctatacgtttttgtaatcgttctaattctttagtcatttttttctcctttttgattgactagattactgaaaaaagcatccatttcttcatcgtcttcttcagttgtcggcaaatcttctatacttgaaataccaaatacgtttaaaaataaatcagtagtgattaattgttggctacgctgttcattgaccactttagcctcaactagtcctttggcaatcaatgttttaactgcaccatctgaattgatactacgaattaattcaatatcacttcttgataatggttggttataagcaataattgatagtacttccattgctgcttgtgataatttcatttgtgacttttgttcaattaattgttcaatgtacgttgccgcttcttttttagtcgttaaaacatacgtcgttccaaatcgttgtattattaatccatgtgatgaataattttcaattaattctacgagttggtctttcgatatatctaaaatttctaatagctgtttttcatctaaaccttcatcgccagctgtatataatagcgactctaatataccgtgattatccaaaatggtagttcactcctctaataatgttaatatcttcaaaattacgttgttgctcaatattaattattcctgcttttgacatctctaaaatagctaaaaagtgagtgactacttgttcaattggctcagaaaacgtaaacagactaaagaagttaaaatgatctttatctttcaatctcgatgtcacttgttctgtagcttgttgaatggtaaatgtctcttttcggatttcaacagatttaggtgtatttaactcaactctatttttaactctttgataagctacaattaattcagttaaatcaatcgtatgatttggatcccaagattcatctgtttccaaatgagataaatctgtcggtctttttgtaaaataaaaatctctttcttctttcatgtcatttaaaatagcagtatattctttataattttgatattctattaaacgcccaactaaatcttcccgtgggtcatcatcaacatccatatctgatgttgattgtggtaatagcatcttacttttaatcattaagagttctgacgctaatactaggtattcacttgcaatattaatttcaagctgtttcattgcatgaacgtactgcatatactgctctgttaatgcttgcataggaatatcataaatatctatttcaaatttttggataagatgcagtaataaatctaatggtccattgaaagcatctaatttaacttcatacataatatctacctcgtattgcgtcatatgtgcataattctctaaaatattatagcatgaaaataacttacttttaaattggggtgataacaaaatgcaacaggcactgataaatttctattatcaatttcatactaagcaacattatttcctatgtcatgacattttagaagatgcatggaaagctgaaaataactacagtaagcaagatgcagttgttagtttaatcttgtttgcaactgcttgttaccattatcgccgcaataatttaaaaggcgcctataagtcttttaataaatctaaagaaataatacaaaatgctaaagatagagatgcgttacaccttaatttaaatgattatcagttgttaattgagcaacagcttgcaaaattgaatgcagcaaagcctttttcatctgttatattaccaataactccagactttgagcgcatcatcaaggccaactatccagattataattataatcacgaaacagcaacagatccttttattgtagaccatcacatgcggcgtgatcgttcagaagttattgcagcaaaagaagaagcgattcaattaagaaaacatagacgtaattaatcaaccaatttaaaaaagccacaatagcacagacatttttagtcatgtgtattgtgacttttgagttatggttcactttatgctctaggatgaaattggttatacatttttctaatttgagattttgaaacatgtgtatagagttgggtagtagagatgtcagagtgacctaacatctcttgcactgctcttaaatctgcgccattttccaataaatgtgtcgcaaaagagtggcgtaacgtatgtggcgttagcgtctttttaatgtttgcctttacaccattttgtttaatcattttccatattgcttgtcgtgataaaggtttaccatgcatatttaaaaataagacttcagtaacagtcttttttaaaagttgcggtctaatcgtttcaatataagtggttaagtactcaatgactgcgtcgcctaatggtacaattctttctttatcgcctttaccaaatacgcgtacaaaccccattattaagttcacgttctctaactctaaatgtatcaattcagatacacgcattcccgttgcgtacagaagttctaacatcgtacgatcacgataaccattaattttatttaaatccggcgtttctaataaagccaacacttcgtcaacatttaaaacgtcaggcaattttttgtcatattttggtgaatctaataataccgttggatctttcgccgcatatttttctcttatagcaaattgatgaaaactacggattgttgaaataaatcgcgcaatagatttagcagattgcccttggtctattaaatgccccaaacactcttgaattaattgtcgatctataaaatcaatatgtgagatatgatgttcagtcatataatcttgatactttttcaaatcacgtctataagcaccaattgtgttagaacttagacctttttcaatttgtataaaacgcaaatattcttcaataattgtttccataaccacacctctaaaaaaagcgaaggttaatttaacctacgcaatttactatcctttacctttagcttggcacgtttcacacacaccatggaaagttaaacgatgatctaaaattttaaaattgaactcattttcaactcgattttcaacttctggtaacaaatcttcatcgatttcatctacacgaccacattccatacatactaaatgatggtggaaatgttttgcgccttcttttcttaaatcaaaacgagcgacgccatcaccaaagttaattttgtcgacaacttttagttcagctaacaactctaacgttctgtatactgtcgccaagccaatttcaggcgctttgtcttttactttcagatatacgtcttcagcacttagatgatctttttcattttcaattagaactctaacagtagcttcgcgttgtggcgttagcttatatgatgattgttgtaattgttgcttaacgcgatttaatcgttcttccaacgatgtccactcccctactaataattaaaatcattacaaattatttcaaacttcacaattaaaactaacagttttctcaataaaatgcaagcttttctcattgttatttagaatgattataatttaataataggtgttgtaatgcaatgatagtcttcgcatcttctatttctttattcattagcatcgatttaacattctcaatcggaactttaatgacttcgacaaattcatcttcatctaagtgaactgtgccttcttctaaattatccgtaaaatatattgataattgttcatcgcaaaaacctggtgaaccatacatatctacaacatgtgttaactctttggcaatatatcctgtttcttcttctaattcacgcttagccgcttcgactctatcttcatcatcttctaatttaccagctggaatttctagcaatggtttttctactggtttacgatactgtttcactaatacgacttcatttttaggtgtcaatgcacaaacagcaactgcaccattatgataaactaattctcttgttgacgtttcaccgtttggtaatgtcactgaatgaatttctacatctacaattttgccattataaataactgttcgatcaattgttttttcatttaaatccattataatcacgttcctttaaattcatattatatattgatacactatgcttgttagctaaagtgtatcgaaaggagaacagacatgcaaaaaaatatattaaaaagtggtattgcattatctgaattaggtctaggttgcatgagtttaggtacagatttaaaaaaagccgaacaaattatagattgtgctgttgaaaatggtatcacttattttgatacagcagacatgtacgataaaggtataaatgaatcagttgtcggtaaggcacttcttaaatatcatcaaagcgatgatattgtcattggtacaaaagtaggcaatcgtttaacaaaagatggcagtacaacatgggatccgagtaaatcttatattaaagaggcggttaaaggttcactaaagcgtttaggtattgatcatatcgatttatatcaacttcatggcggaaccattgatgacccattagacgaaacaataagcgcatttgatgaattgaaacaagaaggaattatacgtgcttacggtatttcttctattcgcccaaatgtaattgattattatttaaaacatagtcaaatcgaaacgataatgtctcaattcaatttgattgataatcgtccagaatcattattagatgcaattcacaacaatgatgttaaagtattggcaagaggacctgtgtctaaaggattattaacttcaaacagtgttaatgtgctcgacaataaatttaaagatggtatttttgattattctcatgatgaattgggtgaaacaatagcctctattaaagaaattgaaagtaatttatctgcattgacatttagttatttaacatcacatgacgtgcttggttccatcattgtgggtgcaagtagcgtcgaccaattaaaagaaaatattgaaaactatcatactaaagttagtttagatcagattaaaacagcaagagctcgtgtaaaggatttggaatataccaatcatttagtgtagaagtcattttcagtaataaaaacagcagtatgaggcgtttcattataaaaatgccttactgctgttgtttatgtaaaattcgctataatttatgattaagattactcacttatgatagaaattaaagagttgtcctcacgcatcagtatttagtaatttcgccctgcgccagtgcctcaagcaaacttctgctacttcatcttttaataattttattaaaacatctttctatatttcacttcgcatgttgattcatcattattagttattatttgtacacccagcacatttccttgcaacacaagtagtttgaatttttcacaagtataatataatgtactgtctgaaatttggtctacagaaatatcgcctaaaatatccagcactgtaaattcttcaaacactgatagttgttccgcatatcgtacacaaagtcttaccacactctccgattgacagttcattgccatcccacctatttatgctttatttttaaataatttagggaaacatcgttcaaaaaatctaggcgcaatttgatacattttcaacgcatgatgcatccatttaggccgattaatttctaattgttttgttttaatgccataaatgatatcttctgcaagctgattagcatcaagcataattttcccaatctttttagcatacttcattgatgggtcggctttttgatgaaaaggtgtatcaatcgggccaacattaactgtcatgatttgtaagtttggtgactctagtcttaaagcattcattaatgcataaaaccctgctttcgatgccccataatgtgcagcatttgcttgtgtggaaaatgcggcttgacttgatatacctacaatatgtgcgttagatgttaaatatggtctcaacacagtatataaaacattaaaactaattaaattaagctgatacgtttcaatcatttctgaaaaactatggtctgaaatagatttgaaataacctaaacctgcactataaatgaatccatcgaataatgtattgtcttcaaattgcagtgcctgtatcgacttcaaatcatttaagtcacaaggaataacatttatagttttccccgattcctgttcaaagattctagctgctttatcaacatcacgcaccaacaacgttacattcactttattttctagtaactttcggacaatcgataaacctaaaccacttgtaccaccagtcactataaaatgttgtcctttcatcaattaaccttccttttccattatatagaatgcaatttatcaactttacataattgagacaagttgattatctttcctaatatatatacaataataagaaaatataacatacaaatcaaaaactaaagggatgtgacgttaatgaaactcgtattttatggagctggtaatatggcacaagctatatttacaggaattattaactcaagcaacttagatgccaatgatatatatttaacaaataaatctaatgaacaagctttaaaagcattcgctgaaaaactaggtgttaactatagttatgatgatgcgacattattaaaagatgcagattatgtatttttaggtaccaaaccacatgactttgatgctctagcaacacgcatcaaaccacatatcacaaaagacaattgcttcatttcaattatggcaggtattccgattgattatattaaacaacaattagaatgccaaaatccagttgctagaattatgccaaacacaaatgcgcaagttggacactcagttactggcattagtttttcaaacaactttgaccctaaatctaaagatgaaattaacgatttagttaaagcatttggttctgtaattgaagtatcagaagatcatttacatcaagtaacagctatcaccggaagcggcccagcatttttatatcatgtattcgagcaatacgttaaagctggtacgaaacttggtctagaaaaagaacaagttgaagaatctatacgcaaccttattataggtacaagtaagatgattgaacgttcagatttgagcatggctcaattaagaaaaaatattacctctaaaggtggtacgacacaagctggccttgatacattgtcacaatatgatttagtatctattttcgaagattgtctaaatgctgccgtcgaccgcagtattgaactttctaatatagaagatcaataaaaacaaacccgccaacacatgtatgcatcatcgcaagcactgtgtttgacgggttatttttataaattattactatttggcaagcattgtttattactttgtcattagattttaaaactatcaaaatctttcacaaaattaaaattcggcgtatcttcattttgtatcaatgtttgataaatttcatttatatcttctgtattatagcgattgctcaaatgtgtaatcaacgtacgtttaacattggcttcttttatcaatgcaaatacgtcttcaatatggctatgatgataattgttggctaaatgcttttcaccatctatataggtcgcttcatgtaccatcacatcagcatctctagaaatcacacgttcatttgaacatggttttgtatcaccaaaaattgctacaattggaccctgtttggactcacctctaaaatcttttgattgataaacttgaccattatgttcaaatgtatcatgagattttacttcttgatatttaggacctggttcaagaccaatgttttttaacgcttcaacattgattgtacctgtagtttcaggtgccattactctatatccatatgatggaataccatgattaagtaaatgcgcctctacagtaaaaccatcatgatgatatgttagatgatcatcgatttcaatatatgtaattggatagtttaaatgtgactctgataaattcatagacatttccacatatgctttaattccttttggtccaactaatgtaagcggcttttgttcaccgccctgaaaagaacgactagaaagtaatcctggcaaaccaaaaatatgatcgccatgcatatgagtaataaatatatgtgtcacttttcctaatttaattgcatgatgtaaaatttggtgctgtgtaccttcaccaacgtcgaaaagccatatggaattggaatatggttctaaatttaaggcgattgcttgtgtatttctctcttttgtaggcaaacctgcactcgttccaaaaaatgtaacttccatatatgcccctccttttcttcaattcattttatcataaaatttgtatcaatttagttttaatttatacttgaatcaaaatctgttaaaaattcgtctttgctagttaatttttctaactttaacgtagacaaaactatataaattttgataattacgttatacttatcattaataagtatcacattatacatgatacatgaatcgatatttcatttaagacactgcatactgtcgagcatattgaatgacctgctgaatggattatcttataataataaatcatatatctaattaagaattgaggttttaatcttgagtactaaaaacaaacacatcccttgtttaatcacaatctttggtgcaactggtgacttaagccatcgtaagttgtttccatcaatattccatctctaccaacaagacaatttagatgaacatattgccatcatcggtattggacgtcgtgacattactaatgatgatttccgtaatcaagtaaaatcatcaattcaaaagcacgtaaaagatacaaacaaaattgacgcgtttatggaacatgtcttctatcatagacatgatgttagtaatgaagaaagctatcaagaattattagattttagtaatgaattagacagccaatttgaattaaaaggtaatcgactattctatttagcaatggcaccacaattctttggcgttatttctgattatctaaaatcttctggtcttactgatacaaaaggatttaaacgccttgttatcgaaaaaccattcggtagtgatttaaaatcagccgaagcattaaacaatcaaattcgtaaatcatttaaagaagaagaaatttatcgtattgaccactatttaggaaaagacatggttcaaaatatcgaggtattacgttttgcgaatgcgatgtttgaaccattatggaataacaaatatatttcaaacatccaagttacatcttctgaaatactgggcgttgaagatcgtggtggttattatgaatcaagtggtgcactaaaagatatggtgcaaaaccacatgttacaaatggttgcattattagctatggaagcacctattagtttaaatagtgaagatatccgtgctgagaaagtaaaagtacttaaatcactgcgtcatttccaatctgaagatgttaaaaagaactttgttcgtggtcaatatggcgaaggctatatcgatggtaaacaagttaaagcataccgtgatgaagatcgcgttgcagatgactctaacactcctacctttgtttcaggtaaattaacaattgataactttagatgggctggcgtaccattctatatccgtactggtaaacgtatgaaatctaaaacaattcaagttgtcgttgaatttaaagaagtaccaatgaacttatactatgaaactgataaactgttagattcaaacctattagtaatcaatattcaacctaatgaaggtgtatctttacatctaaatgctaagaaaaatacacaaggtatcgaaactgaacctgttcaattgtcttattcaatgagcgctcaagataaaatgaatactgtagatgcatatgaaaatctattatttgattgtcttaaaggtgatgccactaactttacgcactgggaagaattaaaatcaacatggaaatttgttgatgcaattcaagatgaatggaatatggttgatccagaattccctaactatgaatcaggtactaatggtccattagaaagtgatttattacttgctcgtgatggtaaccattggtgggacgatattcaataattgaattaaaacgcacatgttaaacaaaaataaatgagcgaatgacaaggattgattacgaatcaagtaaatcaattgttctatcattcgctttttttctagactatattatgaaattatattttacaatgcccaaaactattttaataatcattgaacaaatgggtgtataatttatagaaataatgtagaataaaaataaatgattgaattaattggagtgaaagttttggacgttatcaagcaaatacaacaggcaattgtttatattgaagatcgtttattagagcctttcaatttgcaagaattaagtgattacgttggtctttcgccataccatcttgatcaatcatttaaaatgattgtcggcttatctccagaagcttatgcacgcgcgcgtaaaatgacactcgctgcaaatgatgtgattaatggtgctacacgacttgtagatatcgctaaaaaatatcactatgcaaattcaaatgattttgcaaatgattttagtgattttcacggcgtatcacctattcaagcttctactaaaaaagatgaattacaagttcaagagcgattatatatcaaattatcaactactgagagagcaccctatccatacagattagaagagacagatgatatttcattggttggatatgcacgatttatagacactaagtatttgtcacatccttttaatgttccggattttttagaagacttgctcattgatggtaaaattaaagagttacgacgatataatgacgttagtccatttgaactatttgttattagttgtcctcttgaaaatggtttagaaatatttgtaggtgtaccaagtgaacgttatcctgcacacttagaaagtcgatttttacctggcaaacattgtgcgaaattcaatttacaaggtgaaattgattatgcaactaatgaagcttggtactatattgaatcaagtttgcagttaacattgccatatgaacgaaatgatttatatgttgaagtgtaccctctcgatatttcatttaatgacccattcactaaaattcagctttggattcctgttaaacagagtccttatgacgaagattaaataattaaaaacaaagaagccccctaatatatctataggtctacaaatggccttagatactattagggggcatattaatatgttaatttaattcgataacacatgcttcatatggacgtaactgttttaaattaactttggcatcataattaaatagcttcacttctccatgacttatatcaaatggtacagttaattctgcttcgtggttagtaagattacctacaataagaacttgcttttcatttaatgttctcgtgtatgcaaaaacttgtgaattttcagcatctactaaatcaaattgaccatatacgtaaacatcattagactttcttaattgaattaaatctttataaaattgtaatactgaatgctcatcttctaattgttgtgcaacattgatagttttataattcggattcactgggaaccacggttcaccatttgtaaatcctccatttaacgtatcatcccattgcattggtgtgcgagaattatctcggttctcatctttatattttgcaagtaaagcgtctacatctccaccttgagctttcacaatttgatagtcatttttaacagcaacatcgttaaatgtttcaatactttcaaatggataattcgtcataccaatttcttgaccttgataaatgaatggcgtaccttgttgcaagaaataaactgctgcatgacttgttgctgattcataccaatacttgtcatcgtcaccccacgtcgatacacgtcgtggttggtcgtgattttcaataaacaacgcattccaacctttattttcaagttgtttttgccatctatttaatacagatttatacgaatttacatcaaagtgagaatcaccactattccacagtcccaaatgttcaaattggaatatcatattaaatttaccattttcttccccgacccagtcatcagcatcatcagggcttacaccattcgcttcaccaacagtcataatgtcatacttacttaatgagcgatctttcatctcttgtaaccaagtttgtatacctggctgattcatatctacatcaaatgctggggcatatgttttaccctcaggtacaggtaagtcacccgcttcaaacgtcttcttaatatgcgtaattgcatctactctaaagccatcaatgcctttatcaaaccaccagttcatcatttcaaatacagcatctctaacttccggattaccccaattcaaatcaggttgttttttactgaatagatggaaataatattgctcagtattagcatcatattcccatgtagatccattaaagatactttcccagttgtttggttcagagccatctggctttggatcttgccaaatgtaccaatcacgtttgggattgtctttactagatttagattctataaaccaaggatgttcatcagatgtatgatttacaactaaatctaaaataagcttcatgcctctatcatgaacaccttttaataaacgatcaaagtcttccatcgttccaaattcatccataatctcttggtagtcactaatatcataaccattgtcatcattaggtgatttaaacattggactgagccaaatgacatcgatacctaaatcttttaagtagtccaatttatcaatcattccaggtaaatccccaataccatcgtgattactatcattaaaacttcttggatatacttgatatgctactgcttctttccaccattgcttattcattttaaaactcctttgctatcgctgtgttgattttcttatttttaattctgtatctataatgacgagttcaataacatcctgtgctttattttttaatatatttaaaattgctgcaccagcctgttgacctaacattcgaggcttgatgtcaatactggtttgaggtggtgacgcaatttcggttaaataagaatcattgaacgttgctgtcattacatctttcggaatttcaatattaagttcatataggacacttaaaatcgctaaatgtaacatagcatctaacgaaatgattgcctgtttaatatttgggtccttcaaacgtgtatgtagattttgcatgtaattaaaaataacttctctttcattactagtctcaataatttgataattaattttattttgaaaagctatcgtttcaaatccttgaatcctgtctttcgaaacttcaaaatcgcctttttctgtaataaatattaattcatctacaccttgttcaataacatgtcgtgtcaaattttcagaagctaatatattatcattatctatgtgtgtaaattgatgatctatatccgatgtaggcttaccaatcacaataaatggcatgctttcatcaattaacatttgtttaatcggatcattttcttttgaatagagcagaataaacgcatcaaccattcgttgtttaatcattttataaacttcatccattaaatcattcatattatttgagactgtcgtttgtgtaccatagccatgctggttacacgtttcagaaattcctagcaatacattgatgtagaatggattcagtcgaataggctcctcagacccttttaacactaaaccaattttatatgtttggtttgtaattaaggttctagcagcagtattaggaaaataattcaattcttccataactttcttcacttttgaaattgtcgcttcgctaatacgttgatttccttttataactcttgaaactgtcgaaggagaaacaccggcttttagtgcaacatctttaatcgtaaccatttaatcacctcctgttaatctctgtattggaaaacgcttccaatccctgtataatatcagtttagtcacactttctaaaaaagtcaaaagatttgtgcaaacgattgcataaaacgataaaaataaaaccttcatactgaaattcaatccgaaaatcaatataaaggtttgtataaatattaaaatcgattgtttagtcactaactgcaaaatagttaccttggccatcttggaaattaaatacacgtcgaccattcatttctgctatatcatgcccagttaaacctaaatcatttaattttgagtataatgcatcaaagtttttctctttaaacattaaagatggtgttcctaggttcacctccgggctatacttttcaataaattcttttgccataatcgtcaatgacgtttcagcatctttcgtaggtgatacttcaactgcaacatagtcctcagctaacggtgtttcacttacaacaacaaattctaaagtttctgtccaaaatgctttcgctttttcaacatcatcaacatataacataacttgatttaacttttccataaaatagtacctctatttctctatagtacatgctatcataacacagtaaatattttattacttcacaaaatgcttaaaaatatggcaggatgattttacggtcaaagataatacttgtgtaattttttataggttgtatctactctatcacactcttttttatattaatcaaaagatataaaaaaggatagtatctttcaactatcctttagtcaatattattcttcaatccattgtgtatggaatacgccttctttatcttttctttcgtacgtgtgagcaccgaagtagtcacgttgtgcttgaattaagtttgcaggtaaatcagctgcacggtaactatcatagtaattaatacttgatgagaaaccaggtgttggtacaccattttgaacaccagttgcgacaacatcacgtaacgcatcttgatattcagtaacgatgtttttaaagtaaggatctagcaataagttttgtaatcctggattattatcgtaagcatctttgatcttttgtaagaattgtgcacggataatgcaaccttctctccaaatcatagctaaatcaccaagttttaaattccattcattatcttcacttgctttacgcatttgcgcgaaaccttgtgcataagaacaaattttactcatatataatgctttacgaattttttctaaaaagtctttcttgtcaccatcaaatgatgcttttggaccatttaattctttagaagcatttacgcgctcttctttgattgaagagataaaacgtgcaaatacagattcagtaatgattgttaatggaatacctaattctaatgcgttaattgaagtccattttcctgtacctttttgacctgcagtatcaagaattttttcaactaatgcttctttattttcatctaatttcatgaaaatatcaccagtgatttcaattaaataactttctaattcaccagcattccagtctttgaacgtttgagcaatgtcttcatgagacatgcctaataattctttcatcatagcataactttctgcaattaattgcatgtcagcatattcgataccattgtgtaccattttcacatagtgtccagcaccattaggtccaatataagtaacacatgaagcaccgtcttttgcctttgcagcaattgcatcaagaatatctgcaactttgttataagcttcttcttgtccacccggcattaatgacggaccagttaacgctccaatttcaccaccagaaacgcccataccaataaagttgattgcactttgtgctaatgctttattacgtctgatagtatcttgatagtttgtattaccaccatcaattaaaatatctccatcatctaataaaggtaacaaactatcaatcgttgcatccgtagctttacctgcttgaaccattaataaaattttacgtggtttttctaaagaattaacaaattcttccaatgagtacgttggatgaatatttttcccttttgattcttcaaccattaaatcagttttttcacttgagcggttaaatacagatacactatatccgcgtgattcaatattccaagctaggtttttacccataacggctaaaccaataactccaatttgttgtgtcatattacttacctcacttgttgatttttcattagtattgtatcacaaaatagacatacactacactaaatcatttcgattgtcgcgcaactattttgattatttctaacacttgacttgcaagcaagttcaatgatttaatcggcattctctcatttgttgtatggattttttcataacccactcctaaaatgactgaaggaataccaaatgtattaataatactgccgtctgaaccgccaccagaaataattgtatttgcagataatcctaaattacgagcactttcttgtgcaattttaacaaccgtttcattatcattaattttaaatcctggataactttgctccactgtaactactgctttcccacctaattctgatgcagttgtttcaaacacatcagtcatatgtttgacttgtgtttttattctttctggatcgtgagaacgtgcctctgcttctaaaatgacttcatctgcaacaatattcgtagctgaaccgccatgaaacttaccaatattggcagtagttatttcatcaacttgtcctaatttcattcgactaattgctttcgccgcaatattaatagcactaacaccctcttttggcgtacttgcatgagccgttttgccaaaaattttagctgaaattaacatttgcgtcggtgcacctacaaccgttgtaccgacatcagcacttgcatcaatagcataaccaaagtccgcgtccaacaactctgaatttaattctttagcaccaattaaacctgattcttctccaacagtaatcacaaattgaatttgtccatgtgggatttgttgttcctttatcacttgcaaaacttcaagcatagctgctaatcctgctttatcatctgcacctagaatagtcgtaccgtcagagtatatgtagccgtcatcttttacaattggctttacattaattgcgggtacaacagtatccatatggctcgtcaaatataatttaggtacttcgccttcttcgatagtacttttcattgtacacactagattattggcacctaatttcggatgtttagccgcttcatcttctttaacatctaaccctaatgctatgaatttttcttttaaaataggttggattgttgattcattccctgtctcagaatcgatttgtacaagttctaaaaacgtattaagtaatctttcctcattaatcataatggaaccccttttatcaaaattttcaagtacgccaaacggtaaaaattgatgaaataaaatgttacagtaattgacgttacacagatttatcaggcttgtaaattgtgtcatattattttcaatttaatatatatatttattgtaactcaaactaagctttgtcaaaaatatattgattgatttttcaaagatatcgtataatgaggaaaatgacataagcaaacttactcatgttttttataatattcctttatgatgattgctagttatatcgtctcaagttaaaagttttatatcttatgtcgtaattattaatacaaaggttattcatttggaggcacacaaaatgcaaaataaagttttaagaattatcattatcgttatgcttgtatcagttgtattagcattgttattaacgagtattattccaattttataaactatatctcaactacctatacaaaatcatacaattaaaaatccatccgttataaacgcatgtattaataagttatcgtattgcaacgattactttcaaacatgggtcatacggatggattattttttaagctacttcactatgcattttcaatgaaccaaattgcgatttgatttgtaaatattcttctaattcatttaatatttgaataatacttgctctcgagttaagcgctttgtgcgttgttggcaatggcagttcatccaatttcaaacgcgtctcatacaaattgtgtaaacgcattgctgtatagtcattactattcacatttagaccaatttctttcagcagtgacgcaacatcatttaaaagtggatctttatgacagatactttcgatgagcggtttcattctcattaacaattccacttgctcttctcgcatatcaaaataatgatagtatgaattttcgtttctaacaaaatgatttttaacatctcggaacgcgatagacttcgcctttttaatatttaaaagtaacgcttcaaattcaatcgcaatggtatcttcatatttttcacaaatataactatatttactaaaaatatcagcaatttgttgctcaattttacatttgtattcgtctagttgtttgtctaaacttggcatcattaaattcattgtaaatgcaatgcttagtccaattaacagtaataatgtttcattaacaattaaatgtgcatcaattgattttgcattaaaaacatgaagtaatataacgcaactcgtaatgacaccttcttgtacttttaatacgacagttaatggtataaataacaatacgataataccgagtacaattggactctgacctaataaactaaatattgctgaacctaaaaacaatactaaaaaacatgatactaatcttgaaataatcgcttgtagcgaatgtacttttgtatgtttaatacataatacgactaatatggcgcttgaagcataattatctaaacctaacagcttactaataattacacctaaagtcatacccactgctgtttttattgttctaaatccaatcttgtaaggatttaactttaacatgggttagcgcctcttatctttcttcacaatatttattgaataatgtttgtaattgattaattacgttcatcacatcatgaccttcgatttgatgtctttcaatcatttctgtaatctttccatcttttaataatgcaaatgacggacttgaaggcgcataaccttcgaagtactcacgcgctctttgtgtcgcttctttatcttgtccagcaaatactgtcactagacgatcaggtaatacgtcataatgtaaagcatgtgatgctgctggtcttgcgataccacctgcacaaccacatacagaattgatcataactagtgttgtaccatcttgtttaaggactttgtcaacatcttctgcagtagttaattgctcatatcccgcagattcaatttcattccttgcttgttctacaacaccgttcatgtataaatcgaaattcatgtccataagttcaatcacctatccctttatatttaaactatcctcattctactaattaataacatattgttcaataaactaatctgaatcacacctatatttagacacaattttaacaatataccaaacattatagtgcttaaaatcatggaaactaatttgttcacctgttttcattaatatgtttcaagtatgatgtcttattttgactttactgagaaaatgcattcaaccatgttgattattgttctttatctttttttgaatatattgcaaatattttattgccaaaaaataatacatccatcgacaagaacaagataaaacaagttgtcgatagatgcatctatgttatcactaatatatatttgtattttctaaagtatactgttcgatacgctgtttaatatgattcataaatttacctgtttgtaaaccatctaaaatacgatgatctattgaaatacataaatttaccatacttcgaattgctatcatatcattaattactactggctttttaacgatggattctacttgtaaaatcgctgcttgaggatgatttataatccccattgatgatactgaaccaaatgtaccagtattattaactgtaaatgttccaccttgcatatcttcagttgtcaattgcttattacgcgcttttgttgctaaagtattaatttctctagctatacctttgattgacttttcgtctgcatgcttaatcacaggtacgtataatttattttcatcagcaacagcaattgaaatattaatgtctttatgtaagacaatttcatttccttgccagctactatttaataatggatatgcttttaaagcatctgctacagcttttaacaaaaaaagcaaagaaagttaaattatatccttctttatttttaaagttgtttttataatggtttctcgtattcacaaggtttgtagcatcaacctcaatcatcatccatgcatgtggaatctccgttacactattaaccatgttttgtgcaattgctttacgcacaccatttactggtattgtgctattttcactattgccttcagatgattggttacttgatgtatctactgaagttgattgtgtttgaacttgtttgtcagattgagctgtggtaccaccattttcaataactgacattaaatccttcttagttacacgaccttcaaatccactacctacaacttgtgataaatcaatgtcatgctctgaagcgagtttaaatacaacaggtgaaaagcgaccattatttcgtggttgattttgtttagcagtagatgtctgttccactgttgaactaggttttttagtagatttctgagtatgctcatccacttttgcttgtatctcttcagttgtttcatttgtcttttcatcagcagtttcaattttacagataattgtatcaatagctaccgtctgccccgcttcaactaaaatttctgtaattgttccagatatcgtggaagggacttcagctgtcactttatctgtaataacttcacataatggttcatattcatcaatatgatcaccaacagaaactaaccattgttcaatggtaccttcatgaacactctcacctaacttaggcattgttatttccatgactttccctccctagaattctgctaattcacgcattttatttaagattttttctggattcatcataatttcattttctaatacaggtgaaaatggcatagatggtacatctggagcagctaaacgcatgattggtgcatctagttcaaacagacaatgttctgcaataatcgctgacacctcagacataatactaccttctaaattatcttcagttacaagtaaaactttacctgtatgtttagcacgatctataattgtttctttatctaatggataaacagttcgtaaatctacgacttcaacattgataccgtctgcagctaaaatatcagcggcttgtaaacaataattgaccattaatccataacaaaatactgttacatcttcaccttcacgtttaacatctgcttttcctataggtactgtataatattcttctggtacttcttcttttaagaaacgataagcctttttatgttcaaagtataaaacaggatcatttgattcaattgaagataataatagacctttagcatcatacggtgttgaaggtataacaattgttaaacctggtgatgaagcaaatatactttcaatactttgtgaatgataaagtccaccatgaacaccgccaccaaatggtgcacgaatcgttaatgggcattgccattcattatttgaacgataacgcattttcgcggcttcactaataatttgatttgttgcaggtaagataaaatctgcaaactgaatctcagcaattggtcttttaccaaccatagctgcgccaatggctgttccgacaatatttgactcagctaatggtgtatcgataactctgtcctcaccatattgttgttgcagtccttgagtagtaccaaatacgccaccttttttaccaacatcttcaccaagaataaatacatctttattttgttgtaatgctaagtcttgtgcctggcgaatcgcctctaaataagataatttagccattagttaagactcccttcttcgtacacaaatgcataggcttcttcgacacttggatatggcgcgtcttcagcagcctttgtcgctttattgataatgtctttatgttctgcttctatttctgccaaccaagcatcatcgataatgccagctgaaagcaactcttttttgaacttttcgttgcagtctgcttttttaagcgcttcacgctcttcttttgtacgatattggtcgtcatcatctgatgaatgtgctgtcatacgagaagttactgcttcaatcaaagttgaaccttgaccagaaatagctcgatctcttgcttctttcatcgctttatacattgctaaaggatcattaccatctacttgttcaccatgtataccgtaaccaagtgctctatccgataatttttcagctgcgtattgtaatgaatcaggtactgaaattgcatatttattatttataatgacacatacaaaaggaagtttgtgtacacccgcgaagtttaaaccttcatggaagtcaccttggtttgaactgccttcaccaacagttgctgttgcaattttcttcttaccatccatttttagagctaaagcagcaccaacagcatggggtatttgagttgctaccggtgaactttgtgacaaaatattctttgctctactactaaagtgtgatggcatttgttttccaccagagttaacatcgtctttctttccaaacgctgataaaaacgtatcatacgctgagatacccatataagtaacgaaagctagatctctataataaggcgcagtaatatcaccttcttctaatgcatatgccatcccaatctgagttgcttcttgtccttgaccacttacaacaaatggaattttacctgcacggttcaataaccacagtctttcatctatttttctacctaaatccatccatttatatattacttttaggtcttcttcgctaaggcctaatgatttataatcaatcatgttaaatcctcctatttatacgtgaatagctctactttctgctttcaatcctaattccatcaacacttcagagatggaaggatgcgcgtgtgttgttagtcctaattctaatgccgagccattcatgaactgtaacagtgatgcctcattaatcaactctgttacatgtggaccaatcatattaatacccacaatttcttcagttgattgatcaatcaccatttcgctatacccttcgtttgcgtcatggctatcaatcactgctttaccaattgctttaaatggtactttaaaacttttaactttcattccctctgcctttgcttgttcaatgtttaagccgatagaagcaatttcaggttgtgaataaatacacttaggcatcatgttatagtttactgggattgggttcccttcaaacatatgatcgacagccacaacaccttcttttgatccaacatgtgccaattgtaattttccaatacaatcaccagctgcataaatatgtttatcttcagtttgttgaaattcgttcgttaaaatatgtcctgatgttgaaagttttattttagtgttgtttaaaccaatatctgatgtgttaggttttctaccaatcgatagcaacactttatctactttaattatgtctgaagaaatttcaaatgtaacaccatcttcgttaacatttatatcattttcagaaagttttattccctcatagaatttaacaccacgtgctgacaatgatttttttaatagttgtgaagcttgtttactttcagttggtaaaattctttcacctgcttctataactgttacgtcaacacctaaatctatcatcaatgatgcaaattccattccgataacaccaccaccaataataccaacacttgatggtaacgtctttaatgataatatatcatcgctagataaaattttatcatgatcaaatgataagaatggcaactctgcaggcgaagaaccagttgcaattaatacaaattggttgggtaataagtctgattcaccatcttcatattcgacagaaattgtgccactttgaggtgaaaatatagatgtacctagaatacgtcccgtgccattataaatgtcaatgtgattgtgttgcattaaatgctttacaccttgatacatttgattaataatgtcttcttttcgtgccaacatattttcaaaattaacattagcatctttgacatcaacgccaaacattgctgcctgttttactgtttgaaatacttcagcagatttaagaagcgatttagtaggaatacaacctttatggagacaagtacctcctaatagttgtcgttctactattgccactttcttacctaattgagacgcacgtatcgcagcaacatatcctgcagtacctccaccgagaacgactaaatcatattgtttctctgacatgttcttactcctaactaatgatatatatccattgaaaatttattaatacatagttttcatgtccattaattacctattttacatgattgtctatttagtttgaatgcacataaataaatccacaaatgagtattcaacacactttggaaattatctacgtctttgattgtgttgtatcatttctcttgcattttcacgagttaaatcagtaacacttgcacctgaaatcattcgtgcaatttcatctactttatcatcgccaattaactcttgaacttgtgttgttgtacgatcatcttttgatgatttcgaaattaataaatgatggtcgctcatcgatgcaacttgtggcaagtgagatatacaaataacttgtatatattctgctatatctcgcattttctctgccattttttgtgcggcttgtccagatacacctgagtcaacctcatcgaataaaattgcagtttgacctctcgatttaacaaaaatactttttaacgctaacataattctagaaagttctccacctgacgcaattttatttaaactttttaatggttcccctttattaggactgattaaaaattctacaaattcgattccatcaatattcggttcttctaattttttaaatgaaatctcaaggtttgcatctttcatttgtaagttttgaatttccgatacaatgtggtctcttaactccctagcaactatacgacgctgcttagataacgcttgtccaacctctataacttgattatacaatgcatttatttcttctcgtaactgcgatgtactttgttcatagttttcaattttattgatttcattattaagcttttcttgatatgcgattaattctgaaatatcttttccatatttgcgttttaaattattcagcaaattcatacgagattcatactcgtttaacacttgttcgtcgaattctgtattagccatttcatcatataactcatgttttgcatcttctaaaatgtaataaaattgatcaatatcttcttttaatttgtcatatttgtttggaactatatcgtttattgttaacaaatggttgcttagttcatacaaacgatcagtgatagcattttcatccgttaatgtcatatgtgcgttattaagcgctaaacttaatttttcagagttttgaatacgtttaatatctatttcaagttgctctatttcgccttcttttagatgtgcttcagacaattcttctaattgaaatttcattaaatctaaacgctgcagcaatgcttggtctgctgattctaaatcttctaactctttctttttggctttataattttgaaaagtttggtgatatttatccaacaaatcttgataacgtgattctgcgtaattatccaataatgttaaatggtatttttgtttcaacaaagactgcgtttcatgttggccatgaatatctaataattcttgcataacttttcgtaaatcttgtaaagtaactgtttgattattaattttacaaagacttttaccagagctaaaaatttcccgtttaactaataaaaaatcttcatctacatcaatatccatatttttcaatatatgtatagcatctttactctcgtcaatatcaaatataccttcgatgacagcctttttttcaccatgtcttacaaaatcagatgaagctctcattccaattaattgtccaattgcatctataataattgacttacctgaacccgtttcaccacttaaaacagttaaaccatcagaaaattgaatttctaactcttcaataatagcaaattgcttgattgataaggtttgtaacataaactcatcgcatccttataacaaattgaaaattcttgacttgatttcatcacttgcctctttgcttcgacaaataattaaacaagtatcatcaccacaaattgtgcctagtacttcttcccaattgatttggtctaatatagctccaatagattgtgcattaccaggtaatgtttttagaacaagtaaattatcagtaccatctatattaacaaaggaatccattaaataacgtcccaatttttctaaaggatggaattttctatcatttggtaaactataaacatattgacctgaaggtataggtactttaataagttgtagttctttaatatcacgagaaacagttgcttgagtgacatttaaatcataatcgtttaatcgtttaactaattcatcttgtgtctctatctgttcatttgaaataatttctctaattttaatatgcctaaccgattttttgggcacagtaaacacctctgattacgaatatttatacatttattttaacacatgcactgatttacgactactaaacacctttacgtaaaaagggtaaacatggtttatctatcttgattatctatttataaatatttttcatattacgcataacaattgcttaaaatatgtataaaaatgaatatatgtgtaataaacttgctaattattagatttaataagcgtcaattgtttgaacatatttaattaaaatcacattgatgtcacagatacgaatattgtcgtatagaaattgaaaattctattttttaaatgaaagtcttcaacataattttaagtttcaacatgagaaaaatcgattaacaaacaacgtcagttgaatatgccttttgagacatttcaaactttacaattgctgctaatcgatatatttgcttttagtgatccctgctataaaataaatcaacgatttctaataagtgttttgtattgaattgttcatcaatttgcgttagttcatccactgctgcgtctctatgataagtcaatttatcttctgcgccatcttttcctaataaactcacgtacgtacttttattattttcaagatcgctgcccacttttttacctaacttcgcttcatcaccatagcagtctaataaatcatctttaatctgaaacatcatacctaaatgataactataactttctaaatgttctttagttgcatcatcgacattagcgatatctgctgcacttataaccgcaaaagttaatagtgctcctgtttttgttttgtgtatcatttccaaagtttcaagatcaattggttggccttcgctttgcatatctaacatttgaccgccgaccattccaacatgaccacttgctattgacagccgttgtagaacttttatttttacttcatcagttaatctatcatcacttgaaataagttcaaatgctttagttaataaagcatcacctgctaatatcgcagtccactcaccatatactttatgatttgttaatttccctcgtcgataatcatcattatccatcgctggtaggtcatcatgaataagtgaatatgtatgaatcatttctagtgcaattgcgctcttcatacctaactcatactcggtatttagtgaatctaaagtgagtaataacagaactggtcggatacgtttacctccagcatttaatgaatacaacatactttcttctagctgagtatccattactgatttatttatcgcaaccgataattcattattgacttcatctattaatttattcatcggtagattcgtcattttttacatcctcagcttcttcttttattaagtcattcacctttttttcggcattttttaaagttgtgtcacaagctgctgatagtttcataccacgttgatataaatctaatgattcctctaaagatactgtttcattatctaatttttgaacaatttgctctaattcttgcatcatttcttcaaaactttgcgtttctttagtcattattacaccttactttcgtaacttttgcatctactaagccatctttcattgttaacgtcaattgatcattttctgttaaatctttagtactcgtaatgacttcgtcttttttattaacaattgcatatccacgcaacattgtattagttggacttaaattgtttaagttttctactttatttttcaaatcatttttataacttaatatcttagaattcaataatttaacaagttggtttgtcaattgaagattattttgttgttcttgattaacactacttagtaacgcttttaaattatagcgttgttgcaacagcattaatcgatgtctctgttgttcaaaagttgcctgaatttgttgtttcagtctcttttctaaatcatctcgacgttgtatctgttgatcatacaataaagttggttgtttaaacttgtaatacgatgacaaatgttcaacatgtttacgttgttgttctaaatgtttcttgatgaaacgagtcaatgtaaactgatattgctgtacttgttgcagcaattcatattggtctggtgttgcaataacagcagcttgagttggagtcgcagctctgatgtctgcagcaaaatcacttaatgtaaagtctgtttcatgacctactgctgatataatcggtgtcttacaattatatattgcacggacgacagcttcttcgttgaaattccataaatcttctatggatccaccgcctcgacctacaataatggtatctacacctaaactatctgcatattcaattttttcaataatgtcgtcttttgctttttcaccttgaaccaaagtactaatttgtatttgttcagctaatggaaaacgactatttatcgttgaatggatatctcgaattgcggcacctgtactcgctgttaaaactgcaatttttttaggaaacttaggtattgatttcttattcgctttatcaaaacaaccttcttcagttaattttttctttaatgcttctaatttttgatataagttccctataccatctaattgcattttatttacataaatttgatagtttccacgacgttcaaaaacagaaacacgtgcttctaataagacttcatctccttctttaggttcgaagtttaatttagaagcactacctttgaacatcatggcacttataacgctttctttatctttcacattaaagtataaatgaccacttgaatgctttttgaaatttgaaagctcacctttaatcaatacagattggagatgtggatcttgatcaaatttatatttaatatatttcgttaaagctgaaacacttaaataatctgacatataacatcactcaattttatttttttatattactcaatacaccatttataaatttataatgatcatcatcactgaattgttttgttaattcaactgcttcattcattacgactttagcaggtgtatcactgtgtaatatttcatatgttgccattcttaaaataatacgatccgtttttaataaacgtgcaatagtccaatcttttaaatacgggctaattgtctcgtctaatacaggttcgtgatctttaacgccagaaactagccaatgaataaattcgaagtctaaatctggattatcgtctttaataaagcttatcgcttcatttatcgttaaatcactgtccttcatttctaattgaaataaagtttgaaaagcttgcactcgggattctttacgactcatttttaactccttcaaacgtttgtatttttctttatttaattactgaattaggtatgacattacttttcaataacgatttgtgtaatgtgaatattaatttgcttaggttctatcgctgtcatattagaaattgaattaaaaattgacgtttgaattttgtttgcagtttttgaaatattaacaccatgttttaatgcacaatatacatctatatatatgccatcttctttactctcgatttttaaatcacggcttaaatttttacgactaactttttctaaatttgtttcttttaattcagcaaaatggccagtgatgccttcgacttccgaagtagctatacttgcaataacagatagcacttctggcgctatttctactttacctaattttgaatttgaataatcagttactttgaccatggattgacctcctattaaccttcatcattcataatgctattttgctctaaaaagtttgtattaaatttaccgcttctaaatatatcgttattcaataatttaatatggaatggaatagttgtatcaataccaagaaccacaaattcacttaatgcacgaatgccagccataatcgcttcatctcgtgtcggttcatgtatgattaatttcgctaccatcgaatcataatatggcggtatcgtataattagtataacatgctgactctattcgaacaccatatccacctggtgcaagatattgctcaattttacctggtgatggcataaagttcttgtaaggattttcagcattaattctaaattcaattgcgtgtcctgttaatttaatatcttcttgtttatacggtaacacgtcgcccatagcaacttgtaattgtaatttaactaaatcaattcctgttaccatttcagttacaggatgttctacttgaatacgtgtattcatttccataaaataaaatttattatcatttaaatcatatataaactcaattgttcccgcattttcataatttacagctttcgctgcacgcactgcggcatttcccatctcacgacgtgtttcgtcatctaaaattggggaaggtgcttcttccactaatttctgcatacgtctttgaattgtacaatcacgttctcctaaatgaattacattaccatagctgtccccaacaatttggatttcaatatggcggaagttttcgatgaatttctccatataaagtccaccattaccaaatgcagtttgagcttcttgttctgtcattcggaagccagtttcaagttctttttcatcacgagcaacacggataccttttccgccaccaccagcagtagctttaatgatgaccggatagccaatttttttagcgattttcttagcttctgagacgtctttcattaaaccgtcactaccaggaacaactggaacattggctttaatcatttctgccttagcaacatctttgatacccattttttggatagattgataacttggtccaatgaacttcaattggcatgcttcgcataattctgcaaagtcagcattttcagctaaaaagccataacccggatgaacgccatcacaacctgtagaagttgcaatagataagatgttcggaatatttaaatatgaatctttagacaaagtgggacctacgcaatatgcttcatcagcaatttgagtatgtagcgcgtctttatccccttcagaatagattgcaacagtttggatgcctaaatcacgacaagcgcgaataatcctaactgcgatttcaccgcggtttgcaattaaaacctttttcattatttcaccttaaataacggttggccatactctaccatttgtccgtcttctactaagatttcaacaatttcacctgaaatttctgcttgaatttcattaaatagtttcattgcctctaaaatacacactgttgtttcatttgaaacagtgtccccaacttgcacatatgcttcttcgtctggagatggcgatttgtaaaatgtacctaccataggtgcattaattgttttgtgattatctgaagttggctttggagcttcagttttattgctatcagttgattgtacttgaggcataggcatagccgccgcttcaactggcatttgtgaaatttgtggcgtgataatctcagtttctttttctttcttaagcgtcactttgcctttagtatcttcaatattgatttccgttaaagttgatttatccagaatttcaattaattctttgatttctttaaagttcattattactgactccttcagtttgttttcatctacccgtctattttacttgagacaactcttcaattcaagcatgttcatattgctggcgacattataagtctatcccaaagttataataaaaccacattttaaattaaaaacacttgtgtatttattacttaacattgactcatcttaactcttgattaaaaattttatgcattcagttaaacatatcaatgttatttttattagctattatgttttatcctcaacaatatgatatgtagatatatacctttactcatgtctatgttttttcactaccaattagacgattcgttttttattttaaaaattatttttaaaataaaaagcctcatatcagcatataacctataatcattttaggcaatagctttatgagacttatttggaatatcttacgttaaatcagtatagtgaatacaagctatttgttaacaaattagagattatcctcttgaaatgtagcttccatcaccagtgttgataattaaaacatcaccttcgtttacaaataaaggtacatttaatgtataaccagtttcaacagttgccgatttagtagcaccagttgcagtatcacctttaataccaggttctgtttcagttactgttaattcaacagttttaggtaattcaacaccgatagtttcaccttcgtatgtttgaatttgtacttccataccttcttttaagtaattcaattcttcttttaagtaatcacttgaaagttctgtttgttcaaagctttcattatccataaatacatgattatctccgtcagcatataaatattgcatgcgacgattttcaatcattgctggttcaactttttcaccagctctaaacgttttctcttgaattgcaccagttcttaaattacgtaattttgaacgaacgaatgctgaacctttaccaggctttacatgttggaagtctataactttccaaatagcgttatcaacagaaattgttaaacctgttttaaaatcattaaccgaaatcattcagtttcctcctcattttacacgcttatgttaaaactataaggtcttttgtgcatttagtaaagacttgacaaccattttctgtaattaaaatatcatcttctattcttataccgcccaaaccttctatataaacaccaggttctactgtaacacagttgttaacttgaagtttatcttgtatcgtacgagccagcattggcccttcatgaatttctaaaccaataccatgtcctagtgaatgtccaaattcttttccatacccttttgactctaaatagtttcttgaaatggcatcagcttctgcaccagtcatgccaggtctaatctcattaattgctttcatttgagattcaagtactatttgatatatttctttcagtttaggatctggttctccaatagcaaatgttctagtaatatctgaacaatagccgttataatatgcgccaaaatctaatgtaatcatgtcgcctttttcaataattttgtcacttgcaacaccatgtggtaatgcacctctatgaccagatgctacaatcgtatcgaatgatggtccatctgctcctaattctagcattttactttctaatattgcctttaattctttttcagtcatacctgcttttacaacagttaaaatatattcatatgtttcatcaacaatattagctgctttttgaattaaagcaatttcgtcagcatctttgacgtctctaattttatctacagtattagaaatgcttattaatgatatacggcttttatttaattcaaggtatgtatcataacttacatggtgcccctcaaaacctacattttcaaaattttcttggtgtagtaattctttaatctcaccaataatagtagatttacgattaattatttcataatttggcgcctgcttagttgcttgatcaatatatctaaagtctgttatcaaatattgtttatctttagatatgataagtgctccactggtaccagtaaaacctgataaatatcttctattgtaatccgaaagaatgataatcgcatctaaatgtttttgttctaaaatacgatgcacttgtgttattctgctcatcttattacctcctagtgaaacgtttgtgcatttcaactttatacattaaaataatatcataataaggataaaaaataatagatattgattttagggagatagtaatgaaaaaattggtttcaattgttggcgcaacattattgttagctggatgtggatcacaaaatttagcaccattagaagaaaaaacaacagatttaagagaagataatcatcaactcaaactagatattcaagaacttaatcaacaaattagtgattctaaatctaaaattaaagggcttgaaaaggataaagaaaacagtaaaaaaactgcatctaataatacgaaaattaaattgatgaatgttacatcaacatactacgacaaagttgctaaagctttgaaatcctataacgatattgagaaggatgtaagtaaaaacaaaggcgataagaatgttcaatcgaaattaaatcaaatttctaatgatattcaaagtgctcacacttcatacaaagatgctatcgatggtttatcacttagtgatgatgataaaaaaacgtctaaaaatatcgataaattaaactctgatttgaatcatgcatttgatgatattaaaaatggctatcaaaataaagataaaaaacaacttacaaaaggacaacaagcgttgtcaaagttaaacttaaatgcaaaatcatgataggagtcttttaatgcgtaatataatattttatcttgtacttattattgctgcgattggattagtaatgaatctagatgcctttattttttcaatcgtcagaatgttagtcagctttgctgtaatagctggtattatttatctgatttattatttcttcatcttaactgaagaccaacgcaaatatcgcaaagcaatgcgtaagtataaaagaaatcaaagaagaaaatagataaaaaaatggaagcacttgtaggtaaaatagtctacgtgcttccattttttattctaaaaactactttctaaacatccattcatctgaacgatatttttcagttaattcttccacttctgccaattgagcttctgttaattcaagtggctttaattctatatttaaacctttcttaaaacctttctcgaaagcttcttccatttgactaatagtaatgtgttcatctgaaatatcattgatggcaactgctttttcaacgaatgcctctttcatttttaactttaatctttcatttttataaataaacatatcaaacaattcatcaatatcaatatcttgtaaaatcgaaccgtgttgaaggattacacccttttgtctcgtttgagcactcccagcaatcttacggccttcaacaactagctcataccaacttggtgcatcaaaacacactgaacttcgaggttgttttaatttttgacgctcttcaggcgttttaggtaccgcaaaataagtatcaaatcctaagtttttaaatccttctaataatccttgtgaaatcactctgtacgcttctgtaacagtagaaggcatattgggatgcgattcaggcacaatcacactgtaagttagctctttatcatgaagtaccccacggccaccagtttgacgccttacgagaccaaaacctttctctttaaccttatcaatatcaatttctttttgtagcctttggaaataccctattgataatgttgcaggattccatgtgtaaaaacgtataactggatcaatttcacctctagagacaaaatttaataacgcttcatccattgccatattataatatgggtctttacttcctgtattaataaaattccaagtttcagtcatattcaagaactcctatcagcaaaatgtataatatttgattcgctaattaatcaatttaactaaatgaataataattgcaattctttagtgaaatattttgataatttgacctaacagtcttataattatattatcgtttaattagggaggatgcaagatgagtgctagtttgtacatcgcaataattttagttatagcaattattgcttatatgattgttcaacaaattcttaacaagcgagctgttaaagaattagatcaaaatgaattccataatgggattagaaaagctcaagtcatcgatgttagagagaaagttgactatgactacggtcacattaatgggtctcgcaatattcctatgacaatgttcaggcaacgattccaaggattaagaaaagaccaaccggtatacttatgtgatgccaatgggattgctagctatagagccgctcgtattttgaaaaagaatggatatacagatatctatatgttaaaaggcggctataaaaaatggactggaaaaataaagtctaaaaaatagttttgtaaatttaatatacgatttaataaaatctgagtgttaattgatcatcaataacaatactcagattttaattttttaacaaagtctgttactatatttctctagcttcacagatcattaaacttagtttcagcataataaagaaagttcagctcattttcaatacgtttcatttacctcaatctaaaaagtgaaaagacaatttctatgaaagaataatgccaaaccctaagagttattagttcggtttagttttcttgttcaaatagaaattgtcttttttaattgattttgaaaccattatccttaaatcttcatacaaagttagaataataattctcggaatatgtgtttagtaccttatttttcctgtttaagattttcaaattttaatattggtttacgagcagctgtagcttcgtctaatcggtcaatcacagttgtatgtggtgcttctaacactttatcaggatcatttttagcttcttcagcaatactaattaatgtatcgataaaataatcaagtgtttctttagactctgtctcagtcggttcaatcatcataccttcttcaacatttaatgggaagtagattgttggtggatgtacaccgaaatctaataatcgcttagccatgtctaaagtacgtacaccaaattctttttgacgcacaccacttaacacaaactcgtgtttacaatattgtttataaggtatttcaaagtgttcagataaacgcgctttaatataattcgcattaagaaccgctgcttcggaaacctctttaagtccagttgctcccatagttcgaatatacgtataagctcttaagtaaataccaaagttaccataaaatggttttacacgtccgatagaatttttaatgtcattatcatatttaaatttgtcgccatctttaataaccattggctttggtaagtaacttgctagttcttttactacaccgactggacctgaaccaggaccgccgccaccatgtggaccagtaaatgttttatgcaagtttaaatgaacagcatcaaatcccatatctcctgggcgaactttgtccataatagcgtttaaattcgcaccatcataatataaaagaccaccagcattatggacgatttcacggatttccataatgtttttttcaaaaatacctaaagtgtttggattagttaacataatagctgctgtattttcatttacaacacgtttcaagtcatcaatatcaacttcgccacgttcgtttgattttacagtaactgatttaaatcctgcaaatgaagctgaggctggattcgtaccatgcgcagaatctggcacaataacttcatcacgatgtccttcaccattattctcatgataagctttaaatatcatcaatgcagtccattcaccatgtgcaccagctgctggttgtaatgttacctcatccataccagtaatttcttttaattcttcttgcaaactataaataatttctaatgaaccttgaacttggtcttcatcttgtaatggatgtgattcactgaatcctggtattctagcaaccttttcattaattttagggttatatttcatcgtacatgaacccaatggataaaatccgttatctacaccgaaatttttatttgaaagttcagtataatgacgtactaagtctagttcagcaacttcaggaaactccgctttgtttttacgaataaatttatcatctaacaatgactcaacagaatttgttttaatatcacttattggtaatgaatatgcatatctgccttcacgagatctttcaaaaattaatggacttgatttactagtcatttaactcaccagccttttctacaaatgtatcgatttcatcctttgttcttaattcagttacagctattaacatgtgatttttaaagccgtctgaaacaacacctaaatcaaaaccaccgataatattgtacttcactaattcctcgttaacttgttgaattggtttgtcaaatttgactacaaactcattgaaagatgtaccatctaatacttcaaaaccttttttaataaattgttgtttagcatagttagcatgttctatattttgaactgcaatatcatagataccttgtttaccaagtgctgacattgcaattgatgaggctagggcatttaatgcttggttagaacaaatattagatgtcgctttatcgcgtcgaatatgttgttcacgtgcttgtaatgttaatacaaagccacgattaccttcatcatcttgtgtttgaccgactaatctacctggtactttacgcattaactttttcgtcgttgcaaaatatccacaatgtggcccaccgaattgagcaggaattccgaatggctgagtatcacctacaacaatatctgcaccaaatgaacctggaggtgtaagtaatcccaatgctaatggatttgcatatacgataaataatgcttttttatcttcaataaagctatgaatcttttcaagatcttcaattgaaccgtagaagtttggatattgtactgcaacagctgctgtttcatcatccactgctgcttctaattttttcaaatctgtaacagtgccatctaaatcgatttccactacttcgaattccttacgcgtcttagcataagtatgaagtacttgtaatgcttgataatgcaaaccttttgagactacaattttatttttctttgtttgactaaatgctaaaatacatgcttcagcaaagctagtcatcccatcatacatagaagaatttgctacatccatatctgttaattcacaaattaaagtttggaactcaaaaatggcttgtaattcaccttgagaaatttccggttgatatggcgtatatgctgtgtaaaattctgatcttgaaatcatagcatccacaactgatggcgcgtaatgatcataaacaccagcacccaaaaatgatgtatgcgtttctttagtaatattcttgcttgcaatgcgatttaatcttctaagtaacgttgtttccgcttcgccttcagcaatatttaaatctctatttaataaaatgtcacttggtacatcaccgaataattctcctatagattttgcaccaattgtttgtaacatttcttgcttgtctttttcagttaaaggtatataacgatgactcacaatgcacacccctttttaattatttatcaatttgatttttcttaacaattttcgcttttaattgacgcttacgaacttgaacaagcaactctctacccatttcaaactcatctctttttatcattgcaagtgcaattgattttcctgatgatggagactgtgttcctgaagttacttctccaataatatttccatctaaatccataacttcataaccagttcttgcgattcctttttcaagtaattctaatcccactgttcttcttggtgcaccattttctttttgatcttttaatatagatttaccaataaaatcagcatcaattaatggtttacttgcaaaagcgataccaccttcatatggtgtaattgattcagttaaatcttgtccatgtaatggcaatccagcctctaatcttaatgtatcacgagcgcctaacccacatggcataacattatactctaataaaccatcccaaattttttcagtatcatcgatattacaataaatttcaaacccatcttcacctgtgtaacctgattgagataaaatgacgtttgctccaaataatttgacaccctgtttaaattcaaacattttcatttcagttacatcttcatcaactaattgattaattaaatctctagcttttggtccttgtattgctaattgaccatattggtttgatacattttgtacttcaacatcaaatttctctttgtgttttaaaatccaattaaaatctttttcagtattagcagcattaacgactaataagtaattgtcgtcagctaatttatatattactaaatcatcaataataccgccttcttcattacataaagcagtatataatgcttttgaagtagttaaattatcagtatcatttgataataaatattgcacaaactgactagcatctttacctgttacttcaatttcacccatatgactaacatcaaacaggccaatttcgtatcgaacagcattatgctcctctttaatacttgaaaattgaacaggcatcgcccatcctccgaattccacaatttttgcacctctatcaacataattttgatataaaggtgtttgttttaaatcacttgacattgaaatacccccttaaaattataaaaacaggatagcaatcgctaccctgtttataaatcaccaattcaggaacgcgttacagtattatccttttgcctgagagtttcgtaataaattacttgcaccttcggcgatagagtcttaacgctctattctctctaatactgatcactcgcttttattaaatttagcaattcataatatatttctgaaattgatagcaaatgactatcaaatttcttgaatgcgatttcattatatcttaaaatccgcgagcaatacaagtcatttaactgcttgattgtcttattatttgcattaggtcgatgtgggtcatcattgattcgactatatataatttcaatattacaatctaaccaaataatgtttttttgatttttcaaaaaattaaatgcctcttcactttcaataataccaccaccagtagcaattatatctgcagtgttaatacattcttgcaaacatgtgaactctaaattcctgaaatattgttcaccatgtttactaaatatttctggtattgttaacttatacttttcttcgatatatgaatctatatcaataaatgataaatgttgctcatctgcaacgtatttaccaatcgtagatttaccggtacccatgaaaccaattaaaattattggtgatttatcatgattcatgcgttttcccttctttcaataacaaaacaatcttatagttatagtcagtttcaatattatataatgtctttaattttaaactatattgactgatataaaaagtgaaaatggaaaaataaattgctgttagcatcaataagaaaggcgtaacataccctttttctttatataaatcaaaattaataaattatttcacatcctttttaatagtactcatttaaattctagtaagttatacataaatagttttagtctgcacatttgtaccgactttaactgttatcgttattttaataatggatttatagtagatatttgcagtaaatgctgtaacattattaatcattgttatatttcctctgtcatttacaactttaataattttattatttattaatttgtattcgatcatttcttcacctttatgtaaaatgatacgctgttccctaatttcaatattgtttctatctactcctttaaaatcctctagaatatctcttgagaaaaattcgaaatctacagttgttaattccctactttcaattagaaaagttttgctaagtctaattaagtctggaacaattagtaaagttatacttataaccatcatcgctactaacatttcaatgagcgaaaaagctttgacattaatactgtatacatgtcttttgataagaagtggtattttttgaaatagcacaaatttgttggtcactttgcttaatatcatacttccctatagttacccccttcttaagctcttctttattaattttagatacagtcgtcaaaattactttagaagcatcaattgtttgtagtttatggtttatactcgcttgcatttgattcatcattggtatcaatagtaatgtaatcaatccaataagcaaaaatccagccatactatctattaagaatgatcctttacacttatagcttttcataacgaattcttcctttttcaatatggaatattattctataaattgaattgttattatcaattgttatgctaccaaatttattgatattcccttttttatcaaaggcaataatatcaacttttgcaacattaattattttgcctacttttaattttagaaatcgtattttattattctctattactttaatagtgtcactgttttcataaaatctaacattgatatatccttgatttgctatagcttgcgacttaatataattcaattcagtaataagagaaatgatatttgcctcatcatctattactctaagattgcttaatcctttagatgtcattgtcaaaagtaaaaatatactgattaacatcattaccacaagcatctcaatcatagtaaatgctgactgctttctaatttgcaactgcttctccattactaattgttattgtctctcctgatttacatgtcttttgtgcttcttttataaaaccatctgcaattaagtcttcaatagacgatggatttctattatgtttcaatgcatacgcttcaatttgactattaaccatttttacctgtgcattacaacctgttgattgtatgtgagcagtttgtttagcaatatttggaatgattaaaattaataataaactgatgattaataacactaatagcatctctatcaatgtaaacgcttgagttttcttaagaaatttaaacatatattaacctccattattttatactttgcatcatttgaaacattggtaacataattactaaataaattgcgacaataaataaacctaaaatcaaaaataaaataggctgtaaaaactgagtctgttttatcgctttatcttctatttgttttactaatatttgcgaatataactttagttctacttctagcttccctctcttttcaccttgtagcacaaacttaattaattgaggcttaaagcattttagtttttctaaaatttgaggtaaaccatatcccatttctgaataagttaataagtatttacctagaaactgtctaaatggatcactactatggttaatataaacgtctactattgattgaagtgtaataccatttttataaaacaacactaattcattagttacaaaataagttttaaataattggaaatagcctgatattaacggtagtttcatcacaaagtttatcttattgagcatatttaatttgttataaaataatttcataataatagccaatatagataccattatgagcattactacaattatagtaggtaagctggtaatgaaaaacgacaatgttttttgaaaagaagatagttgaatattcatagaagtatataattgttgaaactgtggaattactgtgaggtttaatataataatcatagcaataaaaatagaaactagtattaaggggtattgcagtgtctttaacaatcgttgttctgactttctattcactttcatataatttacggtttcttctagaacgtctatgatattgccaaatctttctgccaaatatacttgcatgacgatagtatcgctataacctatcagtgataatatctgattgcatggtgcaccatttgaaatttcacttagaatggtggtacctaattgcttatttttatatgccatttgaagatttaaaaattgaaaactttgatacagagtgaaaccatatttcaacaaattacataaatttgaaagtaaatcgatttgttgggccttacttaattgtcgcttcttagaatgtagtttaaatgtatttatccattgtagtttcacaaatgacacctgcttttgtcatatcatcaagtttatcttctaagttcttaaatgatgatggtaatgaatgattatgggaaaagaaatatcggagttgttgctgagatagaatttcacatactaattgtcgctgttgcttaatagtagttacaagtcgttggtttataattaagttagttgcctgtatcaattcttgtacagaaatgcccatttctaatagccttaaaatagcacccttacaatcagttgcatgcaatgtagtcagaacaaggtgaccacttaaactagcctgtataacacacttggcaacatctttatctctgatttcacctattaaaattacatcaggatcacatcttaaaatagctttaaacgaatttacatagttaatgccagctttatcattcacattaatttggacgataccaggaatttgcatctctacaggatcctctatagaaattacatttaaattcagggctttattcgcgtatgagaccatttgatacattaatgtactctttcctgaaccagttggcccactaaacaatagtaatccttgtttcttattcatgaggtgtttaaaatcattgaatttataagttgatttctgttgttgaaaaaattgaggtacaattctgataacacaactttcttggccaagtgacaatggtaaagttgatattctcaaaaaatatattttattgaaatggtaactatatcgaccgctctgtgcgacttgctgtgtagaaacatcaagcccagcttgaaacttcatataaactaataacttttgataaatgctattcccaatttgttcatactgctccaagttatcattaattctaaatttaatacttacttcatttttaactggaataaaatgtacatcactcgctttcatttctatcgctttattaattatttcttgaaatagaatcttcaaaaaaacacctcctacatataatcacgtaggaggtgtttttattacttcaatttaaccgtgtaaaaatggatttaattgttcatcatcaaccgtcgtatatggaccatgtccagggaataaaggtaaatcgccttctaattcaaatattttatcttgaatagaatcaacgagcgtttcataatcacctttatataaatctgtacgtccgattccattattaaataatgtatctccaacaactgcgaattcatcgaacacatatgttaaacttcctggtgaatgtccaggtgtgtgtaacacattaaacttaaatccttctatttctgtgctaccttcgtttaacttttcaggagttaccttacttgtaataattggtaatccatattgcttaaatttatctgccccatttttaacgggatcttttagaaaatcaaactctgcttcatgcatataaaccgggacatcgaatcgatcaactatatcatcgactgctccgatatgatcaaagtgtgcatgtgttaataaaatagcttttaacggtttatttatttggtttaattttttaataattttttcactttcacctgaagggtcaatcaggataacagctttgtcattttcgatgaaatacgtattagtatcaactaagcctaaagttaagcttgaaatcctcataggttttcaccactattttctaaatgtttttgtactgatgttagtttatcattcatttttctagatttgtctcgtcggtcatcaatacgtatatttgtacaaactctacttaaacctttatcaaaaggtaattcatgtatcacttgcacaacttctaatacatcccttaattcaccttcaattagagtattcattggtgttaattgaaaatcaattttacccatcgctttatattcttgaagttttttctgaatatctgcaatatatttactaacactcggaccttccgttccaactggaataacaaccacatcaacaatagccattattttaccccctctttatctaatacataggtcttgattaatcctgctgctcctgtaatacctgcatcattacccaatttcgcttgtacaatttcagtttcaaattgagcaggtgtaaatgttaaattatgatattctgttttaatattttcaattaaaataggtcctgcagtagacattcctccacctagaacgatatatttcggattacttgtaacactaataatactgcataaatatccaatatagtttgcaaccttttcagtaatgaaaatacagaattggtcaccagcttttgccgcatcaaaaacagcttttgctgtaaccttattttctttaatcaattctaatatagaagatctaaacgtcaacttaggatagtagaagttaactaagttaacaacgcctgtggctgaagcaactgtttcaatacatccagaacgaccacaattacatttaaatcgttgatcgaagtctgctctaaaatgccctatttctgcgccagagccattatgaccatgtacgatttcaccatttgaaataattcctccacccagtcctgtaccaagtgtgatggcaacaacatcatcggcaccttcaccagcacctttgtgtttctcccctaaagcagctatgttagcatcattatctacatacactggacaatcaacgaattgttcaaaaatctcacgtacattaactttttctggccaatataagtttactgctccatttactgtacctttttcaaagtcaacaggacctggtacaccaatacctacgccaagtacatttgaaaaattataattattttcatttactttttcaacaaacgaatcataaattcctttcaaaagtgtatatcctgtactatcagatgtatcagtgtgaatagaccatttatgtaattgttctaattcaggtgtgaaaatacctaatttacaagtcgtcccgcctacatcagctgctaaaataatttttgtcatttctgttcattccttctctgattaattatcaacgtacatttcaaatattcttccttagataacagttcatattgatacaatgatgaaatctcctgttgaatcatttcgtacatatcttctggatttttaaaatatattagaaatccgtaacttttcaataactgttgtacatcataaaagttatttatttttcgactcatttgatttagtcaactctttttctaagttaatataatctgtatttttagggtcagcatttaatgctttacgcacatattttaatgctttttcatcatcatttaatgaacgatttgctatcgctaactcaaaatttaataaacctgatttaggaaacattctaagtcctcgctcccattctgtcataccttcagacttagaattgatagtagccataatcataccacttaaataatatgtttgatcatcggcataatttttatttattgtctgcttcacaatattttgagcattatcataattaccactagtcatatcatctttgatcaatttattataaatattatcttctttaattgtaaaaattctaatttgaagtgcaataaatataacaagcataccaattagtaaaatccaaaaaatattacgattcactttatagtaatagccaattaaagttattaataaaccaccaatgaatcctccaatatgcgccacaatatttatatttgacataaacagagaaacaccaactaatatcactaatgcaattaataactgtcctaacatttttttgttaaatgtttttgaaacatacatcatcgcaaaaattgatccaatcagaccaaatatagcaccactagccccaactgaaattgtagtcgtattaaatgaaagtgatacaaagtttccaaacagccctgcaataaagtatacagttaacatcctccatgaaccaataattgcttcgactattttaccaaaaataaataatgaaagcatattcataagtatatgttcaaaactaaaatgtaaaaacatcgatgtaacaattcgataccattcaccatgtacgacattaaaatgcactaacccgccaacatctaataattttacatccgaaaaattatttaaatataaaatcatacataaccatattaagacatttacaaatattattgtgtatgttgccggtgaaaatttctgcatatatttatctaaaaagttatcggttaatactttgcgtttatagaacatatatgtctttttatcattatcttctgaaataagtctagccaaaaatatatttggcatatgctttatcaaatcttttgtgtgtcttataacattgaatttaattctaattggcgaaacttcatttaattgttcttctgaaaattccgattctgtaaaataataaaattcaaaactttgtggttcgaaagaaataaaatttgctatttcatctttgtgttcaagcaccttcgctttgtcaaaacgtatttcttgggtagacttgatatgttgtttaaaaatgactacttgtttttttcttttatgggctaaccaaatttcttgatcatctttttccctactgacaatatcaaaattcaagtacctaatccaataatatattgttttccaaaattgtttgtctatgttcatttagtcctccactatgctgattgatatataatcaatttatcgactggttgatcgaatgattccggttcaaatgatgttatttgaaaatcgtataataagcttattgtctttgtctgataattagctaaaaacctgtcgtaatagccaccaccatacccaattctatatccatcgttttgaaatccgacaccaggaacaacaattaaatctaggttattcgttgtttcaccttttgaagttggatagtaaatcccctttttatcgatatcaatatctttgagattaaatatctctttaaaagtcatttgatggtttaaataatccattttcggtacaaaaatacgtttatgatccattaaggcttgttcaataatagaaaaagtatctacttcatgattaaaagaaagaactagcgcaattgcgtttgcttctttgtattcttcagttgcaaaaaattgatttcttaaccatgtgtctgcttttcgcttttcagctttattaaaattcttcattttatgtaaaatgtattttctaatctcatttttagtcacattatcacccactttattcaattctattatatcgttaataacaatacatgtcattatgttgtcgtgatgaattatgcgacaattctaaaatttattatttcaattgaaaatcttttatcatttcatacgtgtgcacaattaaaaaggtgaaacctcttattttgagatttcaccttttttattgttaatttaaatttaattttaatgattattttgtttcacggtgtaaagtttgtttgttttcacgtgaacagaatttcttcatttcaacacgttctggattatttcttttgttcttagttgtaatgtagtttctgtcaccacattccgtacaagctaaagttacgtttacgcgcatggttattcctccttatcatttctaaatacgactttattattataccaacatctataatatttgcaaagttaaaattttacaaccatgcgctacacaatcatcaggctaaattttatttgtctttgtctttatttttatcatctttacctaactgcttaaagtagtagttaattacatctctacctaagtctccacctgttaaccatggtggtggtacaggctgatttgtatatacaattgaaaacgctaattttggatcatcaattggcgcgtatcctatataagtagagttaactcttggctctccgttttggaacacttcagcggtacccgttttaccagcagtaggtactactgtatctttaaaactaacatatcctgtaccatctttatcattaaatgccattttgaatccttcttgaatttgtttgatttctttttcagtattattaaccttgttcaagacggtgccattaattttcttcttgagtggaccaacctcatctttattagttgattcatgaatcgttaatccaatgtgtggctgtattctataaccatcattcgctatagttgaaacatattgtgataattgtaatggtgtataggtatcatattgaccaattgataaatctagataattacctggattatttgttaatggttcgatttgacctcttgtttcatttggtaaatctatacctgttttcacacctaagcctacttgatttaatcctcttcttagcttttgggcaggtgaacttatgtctgaaggtaaagccatgccagaataataagggtctcccgctaattttaatgctgttttaaacatatatacgtttgatgaatgcattaaagcttgcttatcattaatagatacatgcccgtttttattaaagtatgatcgttttgtcaaaccaccttggaaatgtaatggttcatcgaccattgtttctccaactttgatagctttattctgataaccagctaataatgttccaccttttacagaagatccaaccgcaaattgagaagtaaacgtaccaatgtcataatcagtcattttaccactcttattaatctgctttccggcaagcgcaagaatgtctccatttttaggattttgtacaaccatcatagcattatccatatctttggcaccttggctgcgaagcttcttaatttgtttatctaataatgcttctacttctttttgaagatctatatcgattgttaatttcaaatcttgaccgcgagcgccaggatttaacacttctgaagatgtaactttaccagatttgtccgttgtgtatttcatttctttcttcttaccacgcaatacatcttcatattgatattctaggtaagattttccaacacgatcattgcgtgaatatcctttggataagtaatgttctgtcaattcttttggaataccttcagcaggtgtcgatacatctccgaatatacctcttaaagtgtcgccatatggatattttctatcccaatccatagacgtgttaacacctggtaatttggaaagttgctgagaaactgctgcatactctttttcactgacatcttcattttttatcatttgtggatctaaaactgttcctgcattcatctctcgaaaaatggctaaaacttgtaaatctttagaagacaattcatctaattgtgattttccgattttcgataacagttgtttatcatattgatcttgtttaatacttccatctgctaacatagcttgttcttttgtcatcattgcttttgcttttttaggatgcaactgaatccagaaatctttcttatcacgttctgtaatcttcttagtatccatcttgattagcttcgataacttttcagccgtatccaacatttccgattgtgttgtttttcgacccctagtatatgtaatagccattttagaagcattatcaactaaaactttcccatttctgtctaaaatacgacctcttggcacagactcattcactgtaatgttttcatcattttttataatttgtttataatgtgagccttgtgcgatttgtaaataacctaaacgtagtactagtactgcaaaaataaatacaatcacaccaaatataaagttaattctcttgttaattgtattttgaacgatttcatcatttgatttttcttttagtctttttaacaaaactacctacctctattcaaagtctttcactttaaatcatatatgaatttagaaattatttctatctttttgacaaaaaaataacggtctcatttaagagaccgaacaagtaatcatactttattttgttgcattatataattcgtcaactttttcccagttaactacattccaaaatgcgccaatgtagtcagggcgtttgttttgatattttaggtaataagcgtgttcccatacgtctaaacctaaaataggtgttttaccctcagttaatggattatcttggtttggtgtagtcacaatttctagctggccattgtttacgactaaccaagcccaacctgaaccaaagcgtgcagctgctttgtcagcaaattcttttttaaattcttctaaagaaccccattgttctttaattttttctactacagtacctttttcttctgagtttggtgaaagtaactcccagaataatgaatggtttaaatgtccaccgccattattacgtacagcagtttggatgttagctggtacactgtctaaattagcaacaatttcttcaatagatttagattctaaatctgtaccttctactgcagcatttaatttcgtaacataagtgttatgatgtctgtcatggtgaatttccatagtttctttgtcaaaatgtggttctaatgcatcaaatgcgtatggtaattttggtaattcaaaagccataaataatcatcctcctaaaatgtctgtaagtaaataataacaagcagtgactggttcaacaaagaatttgcttaaattctactacttattattttctctactcatttaatataactcaaatcaaaaataattaaacattttgtatataaaaagttaacagatttgccataaaatcatacgaacggagtatgaaatgaacctttatcttctataatttaaaaaatgagatttatgcatacatctgaccaaatgtgcataaatctcatttctttatattaatcttggcaagactcacatacaccataaacttcaagtttgtgtttgtgaatattaacaccaggtagtgataattttatctgatctattggacaataatctattacctttgtatctccacacttttcacagataaaatgatgatgatgatggtttgtacaagcgattctaaacttcatttcaccatcaagttctgtattttcaataatccctaaatctttaaataagtgcaggtttctatatattgtgtcgaatgaaattccaggataattttcatccataacttgttgtatatactttgcgtttatatacttatcttcttcgacaaaaatatctaacatatctttacgtttatctgtatattttaaaccgttctcttttaaaattttaatagcatcatttgtattcattgatattagctccctttttaaacttcattcgcattttctgataagccattgtaatcataagtaaaataactagtagaactacaattacaccacccggagaaatgtccatatagaaagctaggactaagcctaatattactgataattcacctaaaaatacacttagtaatatcaattgcttaaaactttttgttattcgcatacttattgcaattggtaacgtgattaacgcacttactaacaggatccctacaacacgcattgaggcagaaataaccatcgctacaataacaataaataaaaattgaatccatttaggaatgccaatgactttactatattcctcatcaaatgacaatataaataattctttataaaacaatgtaataaacagaacaactatgatggcaatgacaataatcgttgttaaatcacttatattcactgcgcttattgagccaaatagcaatccaacaatttcttgattgaacccatcagctaatgaaatgaagattgcactcaaggcgataccagcactcattataattggaatagcaatttcttggtaagcagtgtatgacgttcttaatttttcaattagaagcgcacctactattgcgaataagattccaaaccacattggattaataaatactagtgttggcataatagtaagtaaaaacataccgaaggatataccacctaaagttacatgacttagagcatcagctataagtgatagtcgtctaacaacgataaaagcaccgattagaggcgcaataaaacctatcaagataccactaattaaagagtacctcataaaatcaaaattcaataatgcatctatcaattgtgacacgcctttccattttaaataaactcaaatctttattaattacaacattctcgattatgctgatgatcgacaaaacgtacaggatgtccataaatttttgaaatttcaacttcatcaagtgatttaaactcatcagttgtaccatggaaatgcaaatgcttatttaaacatgctacttcagtagcagtatctgctacaacaccaatatcatgagtaactaagataatagtgataccttcttgttttaattgatctaaagtattataaaattcacttacatgttttgcatcaataccattcgttggttcatcaagtactaatactgcaggttctgaaatcaatgctctagcaatcattacacgttgttgttgaccacctgataattctgctatatttttatgaattaaatcacttatattcagtctttctagtactttaatcactttttcattatctttgctattaaatgtttggaaaagacgttttgtctttgttaatccgcttaaaacaacttctttaacacttgctgggaaacctgaattaaaggcatttgctttttgtgatacatagcttaatttaattgatgttttcttatttttaaaatcaataccttcaacaaaaatctcaccactttgtaaaggtaataatcctagaatcaacttcaataatgttgatttaccagcaccatttggtccaacaattgctaaaaattcacctttatttattttaatgtttatattttctaacacttttttatgatcatagtagtaattgacatttttcaattcaaagactggtgtcatcgtattctcacctcgcattcaactatacaactcctagtaacatatgtaaacagtaatgtttacgactcaaaattagacaaaataaagagatatgcccccttcaagttttatttatcgcatttcttgaagagagcattatcattttattgttgcataaccttattttttaattctgggtcaaattgctgttgttttaacatttcaatttcaagtttatatggcggttttttatttttcttatcttcaccaacataaggtgtttctaagattttcggaatatctttaaaactatcatgatgcacaatgtaatttaatgcatcaaaaccaatgtaaccgaagccaatattttcatgtcggtctttttgagcgccacggtcatttttagaatcattgacatgaacaactttaattctgtcgactccaatgattttatcaaattcatttaatacgccatcaaagtcctctttcacattatatccagcatcatgcgtatgacatgtatcaaaacatactgataaacgttcgttattatgaactccatcaataatacgtgctaactcttcaaatgagcgaccaatctctgtacctttacctgccatcgtttcaagcgcaatacgtacattattgtcattcgttaaaacttcatttaatccttcaataatcttattaattccggcatcaacaccagctccaacatgcgcacctggatgtaatacaatatctttagcccctatagcttgcgttctttcaatttcttgttgcaagaaatctacaccaagattaaacgtttctggtttggttgtatttgcaatattaatgatgtatggtgcatgaacaacaatattagataagccatatttttccatcacttcatgacctttagttatatttaaatcttcaatacttttacggcgcgtgttttgaggtgcaccagtataaatcataaatgttgtttcaccatattcatgcgcttctatagcagaaccttctaacatctttttaccactcattgaaacatgtgatcctaataacataaaacacacctaaccttttttgttttgcttacgtttttgtctattttgctgcttactaaattgtttgcgctcttgacgtttcattttttcaacttcttgtttaaatttcttcttataacctggtttaactttgtttttaattttacttcgaactttgttcttcacttgattagttaaatggtcatctttgcgcattcttgcttgacgctgattgtgcgctttaacttcttttaactcaccatctttaatatcaacagtattgaatacaaaaccgcgatcttctattaatgaaatattgtgttcttcatcaggactataaagcgtaattgctacacctttataattcccacggccagttcggccgactctatgtgtaaagaagtcaatatcatttggcacatcaaaattgatgacatgactaacaccttcaatatcaataccacgagatgctaaatcgctggcaataacgtattggaattctaaattacgtatacgtttcatttgttgtttacgttcacgtggcgttaaaccaccatgaatcataccaactttaataccagcttcatttagtgaacgtgctaaatcatttgcattatctctactattacagaaaataatacataagtatggatttaatatatcaattaaatttaaagtcttttcaactttagctgcacctttagtaggtattaaaaagaattcgatgttctttttattttgttttttactgtcgacagctacatattctggatgacttaaatatttatttaaaaatggttgtaactgttgtggaattgtagcactaaacaccgcaatatttgcattatcttccaatcttgcagcaatgtaatctacatcttcaattaatcctaagtcaatcataagatccgcttcatcaataactaaatatgatgctaagtgcacatgtaaatgtcccgttttagctaagtcattaattctagtaggggtgcctataatcaattgtggttgtgcattacaacgttgtctatctttctctatatctgtaccaccaataaaaactttaactgaaacgccagctttaaattggcttaaatggttcgctgcatcgtatagctgttgtgcaagttctcttgttggtgcaactacgattgcttgtggttcttttatttcactatcaattaactgcattaatggtaataaaaatgcatgagatttccctgtacccgtttgagattgaccaattaaatttgttctctttagtattcttggaataattcgattctgaatttcagttggtttttcaaaattaaggtctttcacagcgtcaattaaactagattctagattaaattgttcgaatggatgttttgccatgatttggcctccttatatgttcatctttactattataaagtataaatgtgctattttaaataaaaatattaaaacctcgaaatttcaaaatttagaaatcccgagattttagtttaaatatattgaaatggatctgtattaattgtagatgcttcaacatctatatttattttttctgtattgaaccaattcatcagtaacgtttttaaaccttctttcatcacatattcgctgtaatgattaatatcaattaagttcacaccatgaattttagcatctaaggcatcatgatgtttaatatcacctgtaacaaagacatctgcgccttgttgaacagcttgatattcatatccaatacctgaaccaccaataattgcaatacgtttaattttctgattagactcaccaacaaaacggacacttgggatatttaatttagatttaatatcagctgcgaaatcttccaatgtcatttgattattcacttctgccataacgccaagtccataaagggatgtttgttttatctcaataaaatcaaataccggtgtttcatatggatggtattgtttaattaattcctcagcccttgacttttgacatgcatctatcataaattcaattttaacttcatctacatattcaattttatcaatttgtcctattgttggattagcttcaccaactggtttgaattgccctcttccttcactttcaaagaaacaatattcataattaccttcttgtgctaatccattttcactaagcttatctttaaatagtccaacattatccttaggtatatatgtttgaactttatagtatacaccttgttgattatttattattgaaatgttcttcaatcccatcgccttcgccaacatcatattgacaccatgaggatttacatctaaatttgtatgcatcgctattaaattaatgtcatgttgaattagttttctaataatcgaaccataaccattagcttttaatgatgttacgcctttaaagattagaggatgatgactaataatagtattataacctttttcgattgcttcatttactacttccaacgtacagtctaatgctgttaaaacaccagtaacttcaacatcttcatcacctattaacaatcctacattatcccaagattcagcagttctaaatggcacatgataatctaacaatgtcattaaatcagctattttcattactataacaccctttcaattacagcaatttcgtcattaatttgagctaaacgttgatgatgttgttcagtattgagtttcgatttaatatgataaagtgcttctaactctctttgccatttttttataaaatattcatttttgttgttcagcaatttgggtccgaatttcaattcttcagatgatagctctataaattgcgtagaatattctgctacaacaatttcataaatatggcctttttcttccattattatttcatcaattatttcataattcaattgttgtaatgtttgtcttaaattttcagtttggatattactttgcaaaatcaaccttggatgttgacttaacttatcttgcccatcttttaaaattttagcaataagtggtccgcccataccacaaattgtgatattatcgattacgtcctcaggatgaataacacttaagccatcccctaaacgtacatcaattctttctactaattgatttgcagctacatttttcacagcagcttgaaaagggccttgaataacttctcctgcaataccgtaatcgcataaatggttttgaattgcatagattggcaaataagcatgatctgagccaatatccgcgattgtaccttgttttaaaaatcgacttaccgtcgttaatcggttatttaacgaaatcattttattctcctttatgaaaaaagaggttgaacattattcaatgtaccaacctcactcaagttaaatcttaatctaaaaataaataagcgcttattcatgtcttggtatcaatcattaaaattgataaaaattaatccataaagtctttcaaacgtttactacgacttggatgtcttaattttctaagtgcttttgcttcgatttgtcgaatacgttcacgtgtaacaccgaaaactttaccaacttcttcaagtgttcttgttctgccatcatcgagaccaaatcttaatcgtaatacattttcttctctatcagttaatgtatcaagcacatcttctaattgctcttttaataattcataagcagcatgatctgaaggactttgtgcttcctgatcctcaataaagtctcctaaatgactatcatcttcttcaccaattggcgtttctaatgaaacaggttcttgcgcaatttttaaaatttcacgaactttttctgctggtaaatccatttcttcaccaatttcttctggtgctggatctcgacctaagtcctgtaataattgacgttgaactcgaattaatttattaattgtttctaccatatgcacagggatacgaatcgtacgtgcttggtcagcaattgcacgagtgattgcttgtctaatccaccatgttgcatatgttgaaaacttaaatcctttgttaaagtcaaatttttcaacagctttaataagacccatattaccttcttggattaaatcaagaaataacataccacgacctacgtatcttttagcaatacttacaactaaacgtaagttcgcttctgcaagtcttgattttgctacttcatcaccttgttcaatacgtttggctaattcgatttcttcttgtgcacttaataagttaacacgcccaatttctttaaggtacatacgaactgggtcatttattttaacacctggaggggcactaagatcacttggattcagtttctcgtcagtatctgaactatctttttcattaactagtgaaatatcattatcatttaattgatcaaagaaatcatccatttgatcagagtcgatatcgaaattctgaagtttttcagcaatttcttcatgacttaaatgaccctcttttttacctttttcaattaattgcttcttaacatcttctaatgttaatgtcggatcaattgtttgttttttaattttaactgtgttatcagacatgaaacggcctcccgattttaaatatgaacattcgaaatttattcaatattgctattttaaactaaattcttaattaattcatccatatttttaattttattttacaaataggaactaatcccaatatttatttttcaacagtgttgtttaaatgcggtaactatcatttacccttatacattttgacataatcattattcgtattattctttaaaatcacatgctacatgcgttctttattcttagcaacaatttgctgtaaatagtatttctgtaattctacatcgccaatccttgtagcttcccttaatttatgattcaatgactcaattgtttcttgtccgttttcattaataatattgacataatcatcaatttcattttcatatggttcgtcattcaaactatattgttctaagctaattagtgtttctctcaactcatttgaattaacatactgtacagcatcactgatattatattgatcattttccgcataaaaatcatgtaagacttcgaatacatatttaaaatgctgatttgtgaagttatccttatcaacactttcataataatttaaaaatgtatctttatctctcattaaatgttttaaaaatgctcgctccgctttttcttgacggctcaaattgtcaaattgtgccataccaattggctcaggttcaatgtaaccaccatactcatcttctggataataactggctggtgcttgattgaattgtatttcgttagctaactgctcaggactaacattgaaaaatggcgcaacatcatttatagccttttgttgtagaattgatgacttcataagtgaaatgtcatgactcagttctttcaaataacgttcatatgaaaggtcattatgtgcaatttcatcttttaatatactcactttataatgtgcaaatgactttttgtcattttttacaaaagcagtaaatgcgtcgttgccatacttaccaatgtattcatcaggatccatgccagatggcaattgtataacaaatacatttagcccttgctgtaacaaatgttgacctgttttaagtgttgcttcactacccgcaaaatccccatcaaacattaatgttatatttgatgttaactttcgtataaaggtaatatgttcatctgacaactgtgtacccattgttgcaacaacgtttttcaagccagcagtatcagattttataacatccataaagccttctagtaatacaatttcatctaattttctaattgatttacgtgctttatctaagttatataacaactttcttttttgaaagataggtgtttcaggactatttaggtattttggttcttgaccggtatatgttcgacctgaatatccaacaattcttccttgcgcatttttcaaaggaaacataatacgatttcgaaatctatcgtaataactgaagttttcttcgttacgtgataataatccggcttcatatgctaattcaatatcgtaaccctttttttgaagaaaatcatgacaaaaatgtgagctatcgggtgcaaagccaatgcctcgctctttaataagcgcatctgtaaaaccacgttcttgtaagtatgttaatgcttgttcgccttcgactgtctttgttaaagcgtaataataaaattcttgtattaactcatgcatttcaatcatttgtaaatcatcagaagcaatttgaacatttgagttagattgtgttgcctcaatatctacagcaacattaactctatcacctaattctttaaccgcttcaacaaatgatatgtctttaatttcttgagtaaattgaaaaacattgccaccttttttacaaccaaaacaatgacaaatttgtttatcttcagaaactgtaaatgaaggtgtcttttcatcatgaaaaggacacaaacctatataattgcgtcctctcttttctaattttacatattcacttaccaagtctaaaatgtcggttttatcttttatttcattaatgatcgattgatctattcgcaaattaaatcacctattaagcattagttatactattatacctaatttttgacaaaaatgaaatcatttcgatttattttgttcaatataatggattatatcgtttgctgtttcttcgattgctttttgagaaacatcaatgacaggacatccaatttcacttacgatttcttcaaagtaattcaattcttcttggattcgagcttctgttgcataacgagctgtgtcacctagtcctaattgttttagtcgctcttttctaatgcgatttaatttttcttcacttattttaagtgcgatacatttctttggatcaatatcatataagccatctggcggtgtcacttctggtacaatcggtacattcataactttgtaactcttatgcgctaaatactgagataatggtgtctttgaagttctcgaaataccaagtaaaacaatatcagctttaggtaatcctttaggatctttaccatcatcatatttaactgcaaactctatcgcatcaattttcttgaaatatgcatcatctaatctatgaacgatacctggctcattataaggtttttcttcaaccgatgctgataataaatccattaatggccccataatatcgacggacttcaattggaattctgctactttctcactcatatattgcttcatttcaggtttaataagtgtataaacaatgatagcatttgtatctttagcaacttgaatcacttcatcaacatcttcaaaagattcaatatacggatatcttaataattcatttttacattgcttaggattaaattgtgaaatacctgccctagcaactaactctgccgtttcacctatagaatctgaggctacgataattttaattttttccattacttctcacctattctttatataatgctactaataacttagctattgttgttttggaaattcttccaattacttcatacttttgattatctttttttcttacaattggaatcgaatcaatttctttttcaatcattctatctgctgcgtatatgactaattcgctttcctctaaataagtgacattaggcatacgtgtcatatttacactgataggtactgtatgaatatctgctccaatcattgaagctcttaataaatcttttcttgaacacacaccaacaaaatcgttatcttcattaataataaataatgtacttacatcttctaaaaaaattgtacaaatagcgtcataaactgttgtattctctcttagcacaacaggttgagacatatagtccttaacctcaaattgtcgaagtttttcattaaaaaatttaccttttgatttacctgaataataatatccaactcggggacgcgcttctaaaaaacctgacattgttaatatcgctaaatctggtctaagcgttgctcttgttaaattcaacttatctgctatttgttcaccagtaatgggtccttgagttttaacaatttcgatgattcgttcttgtctttgactgagttctataggtcttcaccccttttttattcacttattattataccgatatttctttcatgtcacaaacacattaattttacttgcctttaaataatctatcaattagaataaacgtacagcgagttaaggatagtgtaagcttaacaataagattggcgcaacgaatcattttaaaataaaagcgagtgactacactaatttgggtggaaccgcgggttaaataggtaacttattttgtattatatacaatttaaaatattaactcgtcccatggaagtaaagcatatttactatgctgttattttccatggggcgttttcatgtatgaggagaggtaattatggcaaaagatatggatacaattgtttcattagcaaaacacagaggttttgtgttccctggtagtgatatttacggtggtttatcaaacacatgggattatggtcctttaggtgttgaattaaagaataatgttaaaaaagcttggtggcaaaaattcattacacaatcaccgtttaacgttggtatcgatgctgcaatcttaatgaatccaaaagtatgggaagcttcaggacacttaaacaacttcaacgacccaatgattgataataaagatagtaaaattcgatatcgcgctgataaattaattgaagattatatgcaagatgttaaaggtgatgaaaacttcattgccgatggtttaagttttgaacaaatgaaaaaaattattgacgatgaaggtattgtttgtcctgtaagtaaaactgctaactggactgaaattcgccaattcaatttaatgtttaaaacattccaaggtgtaactgaagattctacaaatgaaattttcttacgtcctgaaacagcacaaggtatttttgtaaactataaaaacgtgcaacgttcaatgcgtaaaaaattaccatttggtatcggtcaaattggtaaatcattccgtaatgaaatcactccaggtaacttcattttcagaacaagagaatttgaacaaatggaacttgaattcttctgtaaacctggtgaagaaatcgaatggcaaaattattggaaaacttttgcaagtgactggttaacaagcttaaatatgagcagtgaaaatatgcgtttacgtgatcatgatgaagatgaattatctcattactcaaatgcaacaactgatattgaatataaattcccatttggttggggtgagttatggggtatcgcaagtcgtacagacttcgacttacgtaaacatgctgaacactctggtgaagatttcagataccatgatccagaaacgaacgaaaaatatattccatattgtatcgagccatcacttggtgcagatcgtgtaacattagctttcttatgtgatgcatatgatgaagaaggcgttgaaggtagtaaagatgcacgtacagttttacacttccatcctgcattagcaccatataaagcagcgattttacctttaagtaagaaattatctggcgaagcgattaagatttttgagcaattaagttctaaattctcaatcgattttgatgaatcacaatctatcggtaaaagataccgtcgtcaagatgaaatcggtacaccttattgtgtaacattcgactttgattcattagaagataatcaagttacagtacgtgacagagattcaatggaacaagttcgtatgccaatctcagagttagaagctttcttaactgaaaaaacaaaattctaattaaaaagactctccaccatatgtggtggctatataatttataaaaagagatactggttagtaaaattgccagtatctcttttctatttgcaaaaggtattcaaataaacacatctatgtggctacttgaataccttttattattttatgttattgttccaatctttttaattggttgattagtttctgacttttaaaaaacatacctgcatattcacgatataacattaaaatgatatctgacatttcatcaataatttcttgatggatattcaatgaattcattttatctattggtaatttttgtaatacatctaataaatatagtgttttgttcgataatataactgcatgtacatctttagaagcctcttgccttgaaatcgcaccgtcaaacttaaaactataacctattaaatctgcttgtgtatcattaccactcacagcacagcgattaaatgatgcggtaaaaccaaatcgtttcatacactttaacataacaacgactgacattaactgtgcagatgtacctgattctattttttcaagaacaaattgtaataattgatagttatatggtgcaatgtcaccttcatccattgagcgctcaatagtttcagctgccagagacgcataactgcttacgtaaaggtccatttgtaatttataatgttgactaataacatctacagaatttaacgttcccatacctcgccactgattgtaaataaacaaaccataaacaaacaattgcgtttgcgcttgtaaacccgtcttaacttttttagcacgccttgccataagtggtacttttgcaccatgctcatttaaaatcgtgataattttatcagattcaccataatcaactgctttgatgataatccctttttggcgcattaacaattatcttcaccacttttaagattaatcttggtcttcaacataaccaatttggcgaataaagttaactttgtttcgccagtctctttgaactttgacccataattctaagtaaactttagagcctagaagcatttctatatcacgtctcgcacgttttcctacttcttttaactttttaccgccttttccaatgacaattcctttttgcgaatctctttcaacatatatagttgcttcgatatgaacacgatcttcgctttctttaaccatacggtccacattaacaccaatcgcatgagggatttcttcacttgtaagatgaaggattttttcacgaatgatttcacccactacaaattgttcaggatggtctgaaatttgatcatctggataatatttaggtccttcgggtaaatacgtctttaatacatcaataaaatgatctacatttagcccttctaatgctgaaataggtacaatctctgtaaagtccatataactttgatattcttcaatctttggcattaattcatctggatgcactaaatctattttatttaatactaaaaatactggtgtcttaacatttttcaacatttctataatatattcatcgcctcgtccaatttcctcattggcattaaccataaacatgattgcatctatctcagataatgtatttttagcgactttcatcatatagtcacctaatttgtgtttaggtttatgaatacctggcgtatcaatgaatataatttgcgcatcatctcttgtcattacaccttgaattttatttctagttgtttgagctttatcggacatgattgctattttatggccaatcactctattaacaaatgttgacttccctacatttggtctacctataattgaaacaaatcctgatttatgttctgtcatttattctaaatcctttcctgaaaatccaaatggtagtaactctgcgactgtcatcataaccatatctcctttatgatttgtcatatacacaggcatatcatcatcacataattccttcaaaacttgacgacatgcaccacaaggtgatgacggtttatctgcatctacggttacagttattgattcaaaatcacctggtctgtatccttgagaaattgccgataccaaactagctcgttcagcacatatcgataatggataagaagcattttctacattggtaccataaaaagttctaccgtctttcatttttaaataagcccctactttaaaatgactgtatggcgaatatgattcttgttgtgcttttctaacttcttgaaaataatgaggttgataactcatatatgcctccctaaaataacgctataaaatgtggtaaaaatactattaaacctataataaatgctaatattgaaactataagtacactaaaagccgctatatctttagcgtatttagctaaatcatgatattcaacggtcactaaatctacaacatattcaatagcagtgtttaaagcttcaacagtgagaactaatgcaatagcaatgagtataaatatccactcaatccgattaatatttagtacgagaccaaagacaatagcaacaatcattgcaaacacatgtaaaagaaatttatagtctttttgaattaagattttcagcccatcaagtgcatatttaaaccttttcataattagtctcgtgttaatccatatgcgtttaatattgtatcttgtcgaccaaacatttccttttcatccgtttcagtcatatgatcataacctaatagatgcaaaaatccatgtaatgctaaaaatcctaattctcgttcaaaagaatgtccataattgtttgcttgttcttgcgctacatccgtacagataattatatcccctaaaacacgtggtatatcaagatcactataatcaatatctggctcatcttcttctaaagcaaatgagattacatctgtaactttatctttatctctatatgttcgattaatttcttgtatttcttgtttatctacaaatgtaacagaaagctcagcatcgtcttctatatgctcttcttttttagcaaattctaataaatcttcaatttgtttataccaagcatctttaactaagcctgtgtgatcgctaaaatctatcgtaaacatttaattctctccttcataatgttcaatgatcttacttaccaatggatgtcttactacatcgctctgatctaatttcaatatacttatacctttaacgttgtgtaacctaccgaccgcttccttaagtccacttttaacacctttaggtaaatcgatttgagtttggtcaccagtaactaccatttttgagccaaatcctagtcttgttaaaaacattttcatttgcgcatgtgtcgtattctgcgcctcatcaagaattacaaatgcatcttctaatgttcgtccgcgcatatatgcaagtggcgctatttcgataatgcctctttcaataaatcgctctgtttgttcacgcccaagaacagtatatagaccatcatataaaggtcttaaatatggatccaccttttctttcaaatctcctggtaaaaatccaagtgactctcctgcttcaacagcaggtcttgttaatacaatacgtttaacagcacctttacggagttgctttgctgcataaactacagctaagaatgtcttacctgtaccagcaggacctataccaaatactaaatcattatttttcatggcattaacatatatacgttgccccatcgttttcgcacgaatcgtcttaccaaatgcatccttagttatctcttcatcatataaatctaacagatgttgaattgtgttattatgtgccattttaatagctgcttcaacatctttaattgtaatattattacctaaatcaataaccttcagcaaattgattaatactgattccgctttttctacgttttctatttttgtacctttaacggcaacttcttgtcctcttgcatggatgacaacatcgaaactctcttcaattgcttttaaatgttcatcattatttccaattaaagcttgagattggttcatatcgtctatttgtataattccaggcatacacgcgctccttttcatatatcatttatattcattctatgatgctttaatatctacttaattatatcatgcaattgattgatttaaacatctttgcattgacttactcatttttctttaatttaaaataatcatttatacttttcaccttgtcataaaagcagattcaattttagactaatcaattttttgttgtaatttaaataactaatatttctcgaaagattctctttgtttttcaatttttcttaacgtaaaaaaacaagcaactaccattacgatagtgcttgttttcaaaaaattttataattgttttggtttagctaaaatttctgaccatatcataccattgattacttcatctttatcaaattggaacgctgatttagtcaaatctttttcgacattttgagaattaagcaactgctttaatttcaaacgttttgtacgttcagataagtatttatcctcaataatatctctagcacgtttttccattttagcaatttgcttttctttttctctatcaatgtcagtacgaatcgttttaatatcatctctaagtgatttttctaattgacgtctaatttcgtcagaattatcttgtctagaaggtctatgtttctgttccaccggttctactttaggcactgtaattggtttctctgtcatcggttttgtctcttgttgttttttaggtgccataggttctacaacaggtttcgatttaggctcttcctttggaagttcatcgaataaaggtggtaacgtatcatcatattttcgtttcgatgatttcttttcttcttcatttaattcttcacttatttctttaaacgttcgctcaatttcttcaaaaaagccacctttttttggttcattatcggtagaagttttttgaggtggcttttgattttgtctatctttatgactattttcgcgcatagtagtaatgatagaaatgatcactgatatgacaaaaattagaataccgacactcatttaatcacctctcgacttaatgttcaggtgactcatcatcactttgatcagttcgtttattaattgcatttctcatgcctgtatcagcttcgatatttttcaaattataataatctttaacgctgatattacctgaacgtaatgcttcagccatagctaatggtacttcagattcggcttcaactactttagcatgcatttcttgtacacgcgctttcatttcttgctcagttgctacagccatagctctacgttcttcagcttttgcttgtgcaatatttttgtctgctaatgcttgttcagtttgtaagtctgcaccaatatttttactaatatcaacgtcagcaatatcaattgataaaatttcaaatgcagtacctgaatctaaacctttgcttaatactgttttagaaatattatctgggttttcaagtacttctgtatggtgcttactagaaccaattgttgaaacgataccttcaccaacacgtgcgatgattgtttcttcaccagcaccaccaacaagtcgagcaatattagctctaactgtgatacgagctttggctttcacttcaataccgttcattgctacacctgcgataaatggtgtttcaatgactttaggattaacagacatttgaaccgcttctaacacgtcacgtcctgcaaggtcaattgcagcagcacgttcgaaaggaagatcaatgtcagcacgttgtgcagcaatattagcgtcaacaactctgtccacatttcctcctgctagataatgcgattctaattggtttgttgttaatgcaagtcctgctttatgcgctttaattaatggcgctataacttttcttggagatacacgacgtaaacgcataccaaccaatgtacctataccaacatgaacgccagctgctaacgctgaaatccataaaccaatcggtacaaatgagaataaaataagtaatgcaactactataataactgctattacgataaaacttaaactaaacatggtatcgctccttttaattaatctacttccctcacaactactcttgttccttcaacttcaaggatttttaccgttttattgcgtaaaataaagttgccatctgaaacagcatcaatacgttcattttcacaaaaaataatccctgctggtcgaagatctgtaactgtttgagcagtctttcctacgaggtgcgagcggttatcatgagaattgtaacctgactcagaattggttgaatcttttaagataactttatccaaaaacggaatctttctgttgaaaatcttcactaatatcacccattctacaatcgttaaaatcaaggcaacgataacattcgcaagcataaatagcaaattatcaccgagcgttgttatgcttatagttatcagtatcatgccaataataccaattactgcaccaactacaaataattcaattacaactaatataacgccaattgagaatattaagatagaatgcatattgacatttccttggattagaaatcccaaaaataaaataagtaatgataatgtggcgataataccagctgcattgatttttttagagtaaagttgatatacaaatcctaagaatgtcaaacaggttaatattaacgtaaaaataggttgaacaattatattactaacttgttcaacccaagtatctccagccgttgattccaagatagttgtcatttgtaaaaaattattataactcacaatttcacctcgccctcacattaattatacatgaaattgaatatactttatagttataagaacctatagaatatcaatttgattatttataaactatataacttttttaattaaaaattgacaacaaaaaaacatcacaagttagtgtcagacactaacttgtgatgtttattttatataattaatattcgtgttgagggagtcaacagaggtattaattatttgaatttacgtttacgtgcagcttctgatttctttttacgttttacgcttggtttttcgtaaaattcacgtttacgtacttcttggattgttccacttttagaaactgaacgtttaaatctacgtaacgcatcttcaagtgattcatttttacgtactactgttttagacatctgtatttccctccctccaaatatcaacggaactttatagtcaattgcacagtaaaactatgcatttataagtataatatatctgtaatttatggtcaattagtaaattgttttttatttgaaacatatttcacatcaaaatcacaaagacttttagattttgttctaaaaatctcttaataatttatttaatgagaagagttgcttatatagtaaattgtgaagccgttaaaacaacgttacaaaacctatatctttaatacggaaccttatggtatgaatcaaggaatacttaaactaaaacttctctatcagatttatttgttgcgaaatcaacaactttaattgcttgcccttcatttaatggataatttgcttgcgtaattttaacttttacaatttgacctatgagtgattcgtcaccttcaaattgtactttcatataattatctgcatatccaactaatgtaccttctgtgtcaccctgttcctcaggaattacttcaagcacatcttgatcaaatttagacgcatataactttccgagttgattgcttagcgtaattaacttatgcacgcgttcatttttaatttcttcatcaatttggtcatccattcttgcagctggcgtgccaattctaggagaataagggaaaacatgcagttcagagaacttatgctttacgataaaatcatatgtttcttggaactcagcttcagtttcacctgggaaaccaacaattacatcactcgtaactgccaagtctggtaaagctttatgcaattttgttaatcgttctgaaaatctatccattgtatacttacgtctcatacgttttaatactgtatctgaaccagattgtaatggaatatgcaaatgacgcacaacttttgttgaacgttctaaaacatcaattacttcatctgtaagttgacttgcttcaattgaagaaattcgaattcgttctaatccattaatcgtttcaagatcacgtaataattgggccaagttataatcttttaaatcttgaccatatccacctgtatgaattcccgtcaatacaatttccttatatcctgaattcactagttgcgtcgcttgttcaactacttttttcggatctcttgaacgcattaagccacgagcccatggaataatacagaatgtgcagaagttgttacaaccttcttgaatttttaatgacgcacgtgttctatctgtaaaataagggacatctaattcttcatatttacgatttttcatgatatttccaacaccattaattggttggcgttctttacggaattcatcaatgtaacctaatagtttatgtctatcttgtgtaccaactactacatcgacaccaggaatttccataatttcagctgatgaagtttgcgcataacaacctgttacacagattacagcatcaggattttgtcttattgcacgtctaattatttgacgactttttttatcacctgtattcgttactgtacaagtattaataacaaatacatcagcattcgcttcaaagtcaacgcgctcatagtttgcttctttaaataattgccagattgcttcagtttcataatggtttactttacaacctaatgtgtgaaacgcaactgttgacataaatattcaccccattaattctttttcataacttattgcacttaacgcatacaatggcgcagtttctgcccgtaaaattctcggtccaagaccaacaactgtactagtattactaaataatgaaatttcattttctgacaaaccaccctcaggaccaaaaatcatcaacactttatcctgagccttgaattgttgtaaagtttgcttgaaattgcttaactcaccatcttttgcttcctcttcatatgcaataagaatatagtcataattatcaatagtatcacaaattaattttaaattcgactcgaattgaatagatggaatcactaaacgatagctttgttcagcagcttctttaattattttttgccaacgctctatctttttggcaacttttgcctcgtttaatttaacaattgaacgttccatgctaacagctataaatgatgaagcacccaattcagtagctttttgtagcaaccactcatatttgtcagctttaattagtccactgcaaatcgtaacatcaactggcaattctgtattaatattttgtttttcttttaaatcaactgcaattttatcacttgttatatcagcaatttcacataaataaactgtttgatcattaaaagttaaaataattttactaccaacatcatatctcattacatttgttatatgatgaatatcttctttttttgtaataaaaaaacgctgacttacatcagcgttttggtctatgaaataacgttgcacattattcactcactttctggccaacaagacaaacccaaccgttgtcatgttgttctgaaataattttaaaacctacacgctccatatgtgactgtataccttcatacttctcttttataataccagaagtaataaaataaccgccttcatttagagtattataagcatcttcaatcatttcatcaataatatgcgctaaaatatttgctattacaatatcaaatttttctgtttcgtctttcaataagttacctggaacagcttcaattaacgtttcacaatgatttcttctgaagttttctttagctacactcactgccatttcatcaatatccaacgctttaatacgttttacaccgattagatgacttgcaatacttaatatacctgagccagttccaacatcaattactgaatgctgtggcaatacatatgtttctattgcctccaaacacatacttgtagtcggatgatcgcctgttccaaaggccatacctgggtcgagctcaatgcaaagctcttcatccgcttctttagcatatgtttcccaactagggactattgtgaacttcttcgacgctcggaatggatggaaatagtttttccattcattttcccaatccgtttctgcaatgatttgctcactgaattgaacgttatgttgatcaagttcatctaaatttaataactcatctttaattcgctgtcgcaacttatcatcataagtcatctcattaaaataggctttcaatcttactcccttatctggataatcctcttttttcaaagcgtaaatttcaccgtatttatcttctggttgattaattaaatcatctgaatcttctatcacgacaccatttgatccatgattttcaagtatattggtagccaattctactgcttcatgattaataataattgaaagctctgtccagttcatactttattctcccttaaagaatctttttgctctatctttaaaattcgaaggttgttcattaatttcttcaccatttaattgggcaaattctttcattagttctttttgtctatctgttaatttagtaggtgttactactttaatatcaacatataaatctccgtatccatagccatgaacattttttatacccttttcttttaagcggaattgcttacctgtttgtgtaccagcagggattgttaacataacttcattatttaatgttggtatttttatttcatcgcctaaagctgcttgtgggaagctaacatttaatttgtaataaatatcatcaccatcacgtttaaatgtttcagatggtttaactctaaataatacgtataaatcaccagcaggtcctccattcacacctggagagccttcgccagctaatctaatttgttgttcattgtcgacaccttcaggtactttcacttctaatttaactgttttattttcagtaccttttccgtgacatgttggacaagcttcttcaaattcttgaccacttccattacatttaggacaaacttgttcagtacgaactctacctaaaattgtattttgttctacagctacatgaccagcgccattacagtaactacaagtctttttacttgttccaggctttgcaccatcaccatgacatgtttcgcatgttacatctttacggattgaaatttcttttgttgtaccaaataccgcttcttcaaatgtcaatgtcattgtatactgaagatcatcacctttttgcggtgcatttggatctctttgtctgccgccaccgaagaaagagctaaagatatcttcaaaaccgccgccaccgaagccactaaaaccgccaaagtcagagccattgaatccttgtccaccaaaaccttgtggcccgtcatgtccaaattgatcatagcttgcgcgtttattatcatcacttaaaacttcataggcttcagaaatttctttaaacttttcatctgcaccttcttctttgttaatatctggatgatattttttcgaaagctttcgatacgcttttttgatttcatcttttgaagcatctttactaatgcctaaaacttcataatagtctcttttggccacagctatctctccttttcttaattaactcatatagtttaacgtaatatgtcatactatccaaataaaaagccaaagccaatgttctattgactttgacttttcagatcatgacaacattctaattgtattgtttaattattttttgtcgtcgtcttttacttctttaaattcagcatcttctacagtactatcgttgttttgaccagcattagcaccttgtgcttgttgttgctgttgagccgcttgctcatatacttttgctgataattcttgaatcactttttcaagttcttcttttttagatttaatatcttctatatcttgaccttctaaagcagttttaagagcgtcttttttctcttcagcagattttttatcttcttcaccgatattttcgcctaaatcagttaaagttttttcaatttggaatactaggctgtcagcttcgtttcttaagtctacttcttcacgacgttttttatctgcttcagcgttaacttcagcatcttttaccatacggtcgatttcttcgtctgataatgaagaacttgattgaattgtaattctttgttctttatttgtacctaagtcttttgcagttacatttacaataccgtttttatcgatatcaaacgttacttcaatttgaggtttaccacgttcagctggtggaatatcagtcaattggaatctaccaagtgttttattatccgcagccattggacgttcaccttgtaatacgtgtacatctactgatggttgattatctactgctgttgaatagatttgagatttagatgtaggaatcgtagtgttacgttcaattaacgtattcatacgtccacctaaaatttcaatacctaaagatagtggtgttacgtctaataatactacatctttaacgtcacctgtgataacgccaccttggattgcagctcccattgccactacttcgtctgggtttacacctttgttaggttctttaccgatttcttttttgacagcttcttgtaccgctggaatacgagttgatccaccaactaagataacttcatcgatatctgaatttgttaagccagcgtctttcattgcttggcgtgtaggttccattgttcttctaattaatgaatctgataattcctcaaatttagaacgagttaagtttacttctaagtgtaatggaccgttttcaccagctgagataaatggtaatgagatttgagtttgtgatacacctgataagtcttttttagctttttcagcagcatctttcaaacgttgtaatgccattttatcttgagataagtctacgccattttcctttttgaattctgcaactaggtagtcaataattacttggtcaaaatcatcaccgccaagtttgttgtcaccggctgttgatagtacttcgaatacaccgtcacctaattctaggatagatacgtcaaatgtaccgccacctaagtcaaaaacaagaactttttcatctttatcagttttgtctaaaccatatgctaatgctgcagctgttggttcattaatgatacgctcaacttctaaaccagcaattttaccagcatctttagttgcttgacgttcagcgtcgttaaagtatgcaggtactgtaattacagctttgtcaactttctcacctaaatagctttcagctgtattttttaagttttgtaaaatcatagctgagatttcttgtggtgtgtatgatttaccttcaatatctactttataatcagtacccatatgacgtttaatagattgaacagtatttgggtttgtaatagcttgacgtttagctacttcaccaacttgagtttctccatttttgaaagctacaacagatggtgttgtacgtgaaccttcaggattttgaattacttttggctcatcgccttctaatactgttacacatgaatttgttgtacctaagtctataccaataattttactcataataaaattcctccatttaatcattaaattaatttgattttaaacaatgtcgtttcgccaaatttaagttattggtttactttgaccattgatggtcttaatactctatctttaagcttgtatcctttttgtagttcttgagtgatttcgccagattcaaaatcagggttatcatcttgaactacagcttggtgaatatttggatcaaatgcttcaccttcagttttaataacttcaagaccattatcttttagtgcgttaatcaaactttcatgcaccatttgtacacctttttgaagagatttaaaagtctcatcatcaccttcaatttgaagtgcacgttctatattgtctattgctggtaaaatatctgttaacacacgttgtgcttgatatgttttatttatttcattttctttttgaattctacgcttataattttcaaactcagcgtagagccttaaatatttctcttcgttttcatctgctaattgttgaagttcattaattttttgatcttttggatctatttcttcaataacattctcgtcagacgtttcttctattgcttcatcttgtaaatgacctttactttcttcagtttgttcaactgaatcatcaatattttgtttgacgtttgtttcttcaactgttgattcagtgtttttttcaactgattcgtctttatttgtcattttctgtcctccaatactttctaatccatcattaccaaattctatttaataattgaatgacattttgataatgcatagctgtaggtccaatcacagcgatttgaccttttaacgtttcatcaaaatgatattgacttgttacaattgaaatatcacttaagctgtcatcaatttcattaccaattttcacattaatatttggtgaagatatatcttgtaataattctgcaattctatttgattctatatattgtagaataggctgaattgaagatacattactttcattcaatgcatcaataagtttaacctttccacccatataaatgctattactttgattagaaatatgattattcatcgtatttaacaatttattgataaatatttcttcctgctctgattgaacaaaagagacaatatcatcttgtaaattctgattaaactcagttagtttgttagtaacaaaatttgatattgtatttagtttgtcattactaaacggtatgtctgaagcaagatgtacatgctcaacatgacctgatgaaaatacgataaccattataactaaattaggattagcacgaatcaagtgtacattattgataatatcttgtttatgattaggatgaacaactaaagttgtatattgagatatatttgataattcatctgcaaaatatgtcaatgctgatgatacatcatattgattctcaactaacaattgatttaatcgtcttaatttatttgttttttgatgagatgtttgttcaagtaaacgattgacataatacctaaaacctaattgtgatggcgaacgccctgaagaactatgtgtcttttcgatatagtttaaatcttcaagctgtttcatctcatttctaattgtagcaggactaacattcaagttatgtcgctcaattagtgttttagaaccaacgggttgtccaaaatcaacataatcctcaacaattgcgtttaatatactcaattgcctatctgtaatcatgttttcacctcattagcactcacttatctcaagtgctaattataatttatcaaattggtcaaagtaagtcaatgttaaagactcgaaatttcaattttttttaatcatttattaggaaagcttcaaaaacctcattaccaatgactttccctcgatttgtaagtgcaatcgcatcgttcttttctacaattaatttcttctcttttaaattatttattgtttgaccaaagacactttcaatagattggtcaaacttctttttgaaccttctactactcacaccttcatttaaacgcaacccaagaaacatttcttcttccattctctcagtcaaagaaggtttatttgatactaaaattgctttactttctttatttatagctttgatataatgattcactggattgatattcgtataacgaacaccatctacataaccacttgcacctgctccaaatccataatattcctcattaaaccaataaaccttattatgttctgattcatgtccatctaatgcaaaattagatatttcgtattgatgaaaaggagaatgttctatcttagacaacagcaactgatacatgtcagcacctaaatcctcattaggaagtttgagcaaaccttttctatacatattataaaattgggtttttggttcaagtattaagccgtaactcgaaatatgttgaatatccatatctaaagctagatctaaactttgttcaaaatcttcaatcgtctgtttcggtaaatgatacattaaatctaaactgattgatttaatacctgcgtttttagcatttaacaccgaagtgtaaatatcttcagtattgtgcgttctacctaaaacagacaataactccggcttgaatgtttgaacgcccattgaaattctgtttactccatatttctctaacagttggactttctctttagttaactcatcaggatttgcttcaaatgtatactcgcctgtgattgtaaacgtatcacgtattgctttaagtaatctttccaactgattaatagaaagggccgttggtgtgccgccacctacatacatggtctttaagatcctatattttgctgtagacatttctgtgattagtgcatctaagtactcatctacaggttgattctgtataaaatatttattgaaatcacaatatgtacatattcttacacaaaatggaatatgtatatatgcactttgtaccgtcattttaatgccccgcttctcagactttttatccaatcggctatatcctgttggactatctgcaattattcttacttttaactttaacgtttaatcaatgattgtctaatatatcgattcactttaatatttataaatgttaagagagagtgagatagaaataataaagaaccactaatgatttattatgtagtggctcttacacattagccagaggtaatatgtacttaaaaataaaattacatgagtaaaactcatgcataagaaatactaatttctaaagaataagtatttctttatgttggggccccgcgaacttgcacattattgtaagctgacttttcgtcagcttctgtgttggggcccaccccaacttgcattgcctgtagaaattgggaatccaattcctctgtgttggggccccattgttataagctctttctaactcggtcgattactgccaatataacattgtaaagcccaggacgttaatttatcctaggctccctctttttagttattaaactttattcattgtaaattgttaattgatttttaaaaattattcgtcatccattttcaatacagccaagaaagcatcctgtggaatttcaacattaccaactgctttcatcttagctttacctgctttttgtttttcaagtaatttacgtttacggcttatgtcaccgccataacatttagctaaaacgtttttacccattgatttaatatttgtacgtgctacaattttttgtcctattgcagcctgtacaggtacttcaaattgctgtcttggaattaacgttttaagtttttcaactaatgctttaccacgttcatatgcaaaatctctatgaactataaagcttagagcatccactttatcaccgtttaataaaatatccatcttcactaaattactttctttattttcgatgaactcataatcaaatgatgcatatcctttggtattagatttaagttgatcgaagaaatcaaatacaacttcagctaaaggtaattcataaacaatatttacacgaatatcatctaaatagtccatatttataaattgtccacgtttacgttgacataattccattactgcacctacatagtcatttggaaccatcatagttgcacgaacatatggctcaaatattttatcaattttatcacgatctggcatttgtgctgggttatcaaccgtcacttctgaaccgtcccttaaaatacattgataaattacagatggtgcggttgcaattaattcaatgccaaattctctttcaattctttcttgaattatttccatgtgtaacatacctaagaaaccagttctataaccaaaacctaatgcttgtgatgattcaggctcaaattctaatgatgcatcattcaattgtaatttttctaatgcttctcttaaatcattataatttttgttatctatcgggaacagtccgcaatataccattggattcattttcttataaccttgcaatggttctgatgcaggtctactagctaatgtgattgtgtcaccaaccctagaatcatcaacatttttaatacttgcaataatataaccaacatcaccaactgttaattcatcaactggaagctgcttaggtgtattaattccaacttctgttacttcgaactctttaccagtggccatcattcgaattttatctccggctttaacaacaccgtctacaattcttatcgatgaaattacccctctatatggatcatactcagaatcaaatattaacgcttttagtggtgcttctgggtcaccatctggagctggcacaacttcaactattttctcaagtatctcttcaattccaatgttagatttagcacttgctaaaacaacatcgtcttggtctaaaccaatcatatcttcaatttcttgtttcacgcgttcaggttctgcagcaggtaaatcaattttgttaataacaggcaataactctaactcattatctaatgccaaataaacatttgctaatgtttgtgcttcgataccttgagccgcatctactactaaaatcgcgccctcacaagctgccaaagaacgtgacacttcatatgtaaaatcgacgtgtccaggcgtatcgattaaatggaatgtataagtatttccatctttagcttcgtactttaaacgtactgcgtttaatttgattgtaataccacgttctctttctaaatccattgaatctagtaactgatcttgcatatctcttgtttcaactgatttggtattttctaaaattctatcagccaatgtagattttccgtggtcaatatgtgctataatcgagaaattccttatattctctcttctttttaagcgttgctcattatccattttatccttctcactttcataaaataaacccgtattatctttcgcatctttgatataataacgtttttaataggtaaatgcaaacgccataatcttggatgaactttgaaattataacaatctttatttaaatacatacttgcgatatgttaatatgttaattacgtacttataattataaaacgtattgattgtgtttccaacacaatttattaaatctgcaaaattttaagctaaccccatcaaataaatgattgcacaacggttagacttttgttaaaatatttcttgttgtaatcaaataaaattttgataagatgaactcacttttaggaggtgacagaaatggcaaatatcaaatctgcaattaaacgtgtaaaaacaactgaaaaagctgaagcacgcaacatttcacaaaagagtgcaatgcgtacagcagttaaaaacgctaaaacagctgtttcaaataacgctgataataaaaatgaattagtaagcttagcagttaagttagtagacaaagctgctcaaagtaatttaatacattcaaacaaagctgaccgtattaaatcacaattaatgactgcaaataaataatctttttaaataaaagttcaagcgcatgcttgaacttttattttttataaagatagaatgaataattccagtattaactgtttatccatatatgatgatttaagtttataatcagtttccgcacaagcatctataatattcaataattcatcaagttgataatgtcttacttgtcctaacgctaattttactctgtatggatgtacgcctattgttttagcaatttgctgtccactatatcctttttgactcagaatcttacattgataaaataatcggtaattacttgtaattagtgcaagtaatttaataggttcttctttcatagttattaaatcttttactaaatgaattgcttgttctttctttcttttctgaatgtattcagtcagtaaaaatacattttgttctaaacttctattaataatttggttaacatcctgcttattaattgttggtctatcgcctaaaaataaaatcaacttttctatctcttgtgagacaatattaaagttaatacctgtcaactcaataaataaatctaatgcatctcttttgatatctttgaaattctcatttaatttactttgaatccatttttttatttcttcttcagacatttgctctatttttttaagccttgcatgcttttttagagttttagttaacttttttctttcatcaagtttattttgatatatctcaaagacaatcaaattttcgccatcatatttttcaataaattctattaattgatctacattgtgagccatatcttttggcgatttttcacctgtaaatatatatgcatttttaaccaaaattgcttttttatctgaaaagaaaggcaatgttaatgtttcttcaacaattggtgcaatctctgtttcgtataaattatatttcacaaagttaaagtcatctctatcacttttcaaaaattgtgatatgatttctgcactttgtttttcaaccaattcaggcacatctccataaatagctacaatattgtcgctcattcattacaccctttcattcgtttgacacatcaatagattatatcatgtttctgtatctataaaccacttgcatttccataagagtttgaatcaacttttaaattatcatctaagtcaattgtaacttgaccgttttgttgactattgtaaatgcgactgcgaatcctttgcaatcgtttaacaacttctatgttaggaagatgatacatattgttctttccagaagaaatcaaacttattttaggcttaatcatctctataaattctttagaactacttgtcttgctcccatgatgtcctacttttaaaatatcaatctccggcaagttatatttttttagtagtaaagattcattatttttactagcatcgcccattaataaaacttttttattttgatatgcaatcatagtaataatcgaatattcatttttatctcggctatttggaataaaactatcaaaaaatagaaaactactatctccaagcttaaaactactaacttgccttacatccataagtttaatgttatacttatggcttaatttcgataataacatcaatgtattactactatatcccttattgtatatcactatatgtttaattttaatatggctaataatatattccacttcaccaatatggtcattgtgtggatgtgttaaaattagatactctaattcatttatccctctttcatttagcgttggtaaaatatgatatttagaaattgaataactaggttgtttagtatcattaatcactttcccacctgtatcaatcaagacattttggttcttaccaccttcatataaaatactgtctccctgccccacatttaacattgtaattttgtgatgtgaatttgttggaaacgttattaataatgtcagaataattatagtccaaaacgtaaccaatatatatttacgtttagccaataaccaaaatatgtaataaacagaaattataaatattataaatatccaatcattaaacttgggaacagaaaaatgtgattgcttaattcttgtgaataggtctagtaaccagtcatgaaaattaaaacttaggtcaaccaagtaatttagcggcgttaatcccacaataaaatgacttgtaataaagaataaaatagatagcggaaacaatataatcgaatagtacggtacaaaaatcaaattagataaaaatcccacccattgaagttgatgaaagtttggaatggcaacgataaatgaagctaattgtgcaataaacgtaattaggaataatgattgtaactttgacaattgctgtaaaaaagggaaaagtagcataataaagaatgaaatgataaatgaaaattgaaatccaatatcataaacaactagcggatttaaaataaacataattataaatgcaaatgctaatagctgaataccctttattttaatttgcttagtaataagcagtacaagagttgtcattattatagctcttacagcactaggtgcataatttgtgtattgagcaaataaagctaatacaatgattgtaattcctttaatgacaaataaaggtaaatttaatcgttttaaaggttggtaaattaagaatacaattgcagctatatgcgagccactaactgccaacaaatgatatatacctatctctttaacacgttccttatattgctcattaatttcttttacgtcaccagtaatcaatgccataatacgatccggaaacttaatacccgaatcataaattcgcttcattataaactgtttatgtttctcaattaaattagaccggttcgattctaggcaactttgtacaactatactttgtaatttaagagttacaaacttattgtcattaactttgaattgtcctttaacaatacaattacgactttcaattttctttaaatcaaaattctttttatttgttaaaaagaaaggatatatttcattttttaaactcaacctacctttatatgtgtcactaccttgacgttgaatttggattacttgagcacgctcattaaactgagaattacgttcaatataattgatataattaaatattgcttgttgtgaataatgtaaataccatgaggagaaaatgattaaaaagagagaaataggggcataaacgattttatttttacgataagcaatatacaaaagtaaaatgaaaagaaatgtagagagcactttgctagaattccaaagcactcctacaatcattgataacgcgacatacagcaaaacattaacctttagtcagatatttagcaacatattctggtgaaaatggaatttttttaaattcaataccagattgtttgagtaacttagttgcatattcatggttatgataatcttctgcatagtagatacgctttatacctgcttgaataattgactttgtacaatttaggcatggaaaatgagtaacatagattgttgcaccttcagtagatacaccttgttttgcacattgtaataaagcattcatttctgcatgtatcgttctgatacaatgtccatcttcaattaaacatccttcatctatacaatgcacctcgccagctacagagccattataaccaccagcaataatacgattatccttaacaatcgttgcgcctacagataatctttgacaagttgaacgtaatgctagcaaatggctttgtgccataaaatattcttcccatttgattctttccaagatgttcaccttccatacttaaaatttagtaacattttctaataatataagattaatcacaaaaaataaaatttgcaattaaaataatccattatatcgtgaaataagatttcagtttatcaaaagttttacttccaaaaccttttacttttttcaaatcgtcaatttcttgaaatgcaccttgttggttgcgatattcaacaattgcattagctttcgcttgcccaactccaggaacagacatcaattctgatacagatgccgtatttaaatttactttagtattatttgtgttcccattttttacgtgcacactgtttactccaatttgtggttcaacattcttttgtcctttatgaggaatgaaaatcattttttgatctgttaatttttcagacaaattaatttgacttacatctgcatcatccaataattgtgctttatcaagcaaatcaactactctatccttagatgtcattttataaacattaggatgtttaacagcaccttttacatcgacatatacaggacctttatttttggaattatctccatctttgacctggacatcttctaatttggacaaactactattttcactagtgctttgtttcagagcagtatctttattttcaaaatttctagaagtataatcatcttgtctccagaatataaaaccaattaataccataattaaaacaacagcacttataatatataacttccattgagttaaaaaatctttatagcgtaataaaaattgatacaataaaaccactcctcaactttatacacgtctgagcgagtggttttacttttattttttcgcaatgaaaaacaatctttctgcatcttcgttatgttcatctatattaaaatcagtaaatgtttcaacatgtttaaaaccgacttgagctaaccaagacaaatatgtcttttcatcaaatgttctctgaaaatgagactcatcaaatcttgaatatgtttcatcttcatgtcgaatgaaaaatgtcatatcatgataaacacttaaaggtaaatctccttgcacagcatcccatgctaaaaaaatgtcccctttatcatcaatataactttgattattaaacaaagtcatcattttataaacagtatgtacatcaaaaataaatacacctgaatcagtcagatgatgataaacattgatgaatgtttcaataactgcagtttcatcttgcaaataatttagagagtcacaaaaaatagtgatgatatcaaattgttgttgcaaatcaaaagatgtcatatctccttcaagccaatttacatttgctgatttttgagctgcaacagtcaacatatcaacacttaaatccataccagtaacattacctaaagcttctaattgaactgttaaactaccagtaccgcatccaatatctaaaatatttgattcatctttgcagtgattttttacaatttcaaaccatttttcatatggttgatcttgagtcaattgatcgtacactaggctcatttctgcatattgcgacataattaatacgcaacctgaccatatgattctaatggtgcatcttgatataacttttcaatattataataatttctttcgtctttatggaaaacatgtaccacaacatcagctaagtcaattaatatccaacgcgcttcattgtatccttccatacgttttacttctatattttgttcattggctacttctttcaccgctctagcaatcgcttgaacttgtcgttcattatttccgtgcgttacaacaaaataatctgtcatatcgctgatacctttcatttctaaagaaattgtatcttcgccttttttattgtcaattgcatccacagcaattgctaataattcttgtgaattcatttaatcatcctttattctttcgtcactatagttataataatttaaacagtcaatcgtcttattatataccgtaatatctttctgtattaaaaatagtactgtgcgtttagaaatttcataaattgtcttatctaaactaccttgattgtatgccatatctcgaatatcatcaactcctgggattgttctaccaggttcgatgtaatctgcaataaaaatcagtttttcagtttttgtcatttgttgacgtccagtagtatggtatttgatagccattaatacttcctcatcattgataccatattcatgttccatgattgctgcacacacaggaccatgcaatatttcactaccataactcagtagatcattacctaattcgtattgtcgaacaatttgatacattttacctaaatcatcatatttacagaaatcatgtaatacacctgctaattctactttactagtgtctccatcataaatttctgctaatttaatcgctgtttctgcaactcttaaagaatgattataacgtttctctggcagtttctcttttgcaagccgttttgctttttcaatgttcatataatccttcccccttaatatagttttcaacggatttaggaacaagaacttggatagatttcccttcactaactctttgtcgaatcattgtcgaacttatatctaccctaggtatctgaattgcaatcatagcattatcaacattttgactatttttgtctcgatttacaactacaaaagtaaccatttcttttaagtattcaatttgataccatttctctagttggttatactgatctgtcccaataacaaagtacaactcactgtctttgtgttgctccttgaatgccttgatcgtgtcataggtataactttgaccaccacgtttaatttcatcgtcgcaaatatctccaaaaccaagctcgtcgataatcatctgtatcattgttaatctgtgctgaacatctataaaattattgtgctttttcaatggagacataaaactaggtaaaaaataaaattcatctggctgtaattcatgaaatacttcgctagctactatcatatgtgcagtatggatagggttaaactgaccgccgtaaagtactatctttttcattattatggcaattcaatttctttattttctttagattctctataaatcactatcatagatccaatcacttgcactaattcactacgcgtagcttcgcttaatgtttcagctaattcttttttatcatcaaagttattttgtagtacatgtactttaatcaattctctgttttctaacgtatcatctatttgtttaatcatattttcgttgataccgccttttccaatttgaaaaatcggatcaatattgtgtgctaaacttcttaagtatcttttttgtttgccagtaagcatatgttattctccttttaattgttgtaaaactgctgttttcatagaattaatatcagcatctttattagtccaaattttaaagctttccgcaccctggtaaacaaacatatctaagccattataaatatggtttcccttgcgctctgcttcctctaaaataggtgttttatacggtatataaacaatatcactcattaaagtattgggagaaagatgctttaaattaataatactttcgttatttccagccatacccgctggtgttgtattaataacgatatcgaattcagctaaatacttttcagcatctgccaatgaaatttggtttatatttaaattccaagattcaaaacgagccatcgttctattcgcaacagttaatttaggctttacaaattttgctaattcataagcaatacctttacttgcaccacctgcgcccaaaattaaaatgtatgcattttctaaatctggataaacactgtgcaatcctttaacataaccaataccatctgtattataccctatccacttgccatcttttatcaaaacagtgttaactgcacctgcattaatcgcttgttcatcaacatgatctaaatacggtatgatacgctctttatgaggaattgtgatattaaagccatctaattctttttttgaaataatttctttaattaaatgaaaatcttcaattggaatatttaaagcttcataattatcatctaatcctaaagaattaaaatttgctctatgcataacgggcgacaaggaatgtgaaatagggtttccgataactgcaaatttcattttttaaatcaccttataaaatagaatttcttaatacaacatcaacatttttaggaacacgaacgattactttagctcctggtcctatagttataaagcctagaccagagatcataacatcgcgtttctctttgcctgtttcaagtctaacagcctttacctcattaagatcaaaattttgtggatttccaggtggcgtcaataaatcgccaagttgattacgccataaatcattggccttctccgttttagtacgatgtatattcaagtcattagaaaagaaacaaactaacggacgtttaccacctgatacataatctatgcgcgctagaccgccgaagaataatgtctgcgcctcatttaattgatatacgcgttgttttatttctttcttaggcataataattttcaattctttttcactaactaaatgcgtcatttgatgatcttgaataatacctggtgtatcatacataaatgatgtttcatctaaaggaatatctatcatatctaaagttgttccagggaatcttgaagttgttactacatctttttcaccaacactagcttcaatcagtttattaatcaatgtagatttcccaacattcgttgtccctacaatatacacatcttcattttctcgaatattcgcaattgatgataataagtcgtctatgccccagcctttttcagctgaaattaatacgacatcgtcagcttccaaaccatattttcttgctgttcgttttaaccattctttaactcgacgtttattaatttgtttcggcaataaatccaatttatttgctgctaaaatgatttttttgtttccgacaatacgtttaactgcattaataaatgatccttcaaagtcaaatacatccacaacattgacgacaatgccctttttatccgcaagtcctgataataattttaaaaagtcttcactttctaatcctacatcttgaacttcgttataatttttcaagcggaaacaacgtctgcaaatcacgtcatcacgaaacatattatgctctggtacaaaaccaggtttatttttatcttcagattgaagtggcgcaccacaaccgatacattttaaaatgtcagacaatcaattttcctcccatgtgatataaccttttttactgaaatgacgtaataatcgtctttcaattaatctattaaacttagtaataaagccatcagttcgtttaactggaacgaccataattgtatataaacctcgacgattaccaccaaatacatcagtaagcatttggtcacctataacaacagtttgatctggtctgatattcatcttagttattgctttatcaaacgctttccccattggctttctcgctttaaaaataaaatcgatgtctaaatgctgactaaaactagcaacacgagactcattattattagacacgattgtaatagtgattcctttttcattagcttccttaaaccatgctttaacacgttctgtaggttctttaacatcccaacctactagcgtattatctaaatctgtaataatacctttaacgcctttgtccactaacttgtctaaatcaatttgaaatattgattgaacatatgaattcggcataaaaaacttgcgaactaaacccatttaactcacctttacctttttataattgagacactaatgcttcaacagtttgacttgatgatacagctgctttttctaaaaatgcttcgaagctcatttccgcttctccatttgctaagtctgaaactgcacgaactacaacaaatggcacattaaattgataacatgtttgtgcaattgcagttgcttccatttcaaccgccatcgcatttggaaatgcttttttaattttttggcgttgttcaacactaccgataaagctatcaccacttacaattaagcctactttagctgttaattgttgttgttgtacaacttgagatactttttctattaaaggtttacttgattgaaatgctaccggcatctgtggtatttgtccatattcataaccaaatgctgttgcatccgcatcatgatattttacatcatcacttataagaacgtcacctacatttaaactttcatctaaagctccagcagaacctgtattaataatgatgtccggtttaaacttattaattaataatgtcgtagaaattgcagcattaacttttccaatgccgctttgggtaatcactacttctctatcttttaaaatgccagtataaaatttaacatgtgcaactgaaatttcgcttaattgtgttaatttattttttaatattgttacttcttcttccatggcaccaattataccaatcatcctttgattcacctcttttaaaaaatcctagcatttgttattttatcacattttaatcactacaacgacaagtatcatgattttcattactatataaaacttttgctttatttttataaaaacattcacaataacgtggtatcataaataattatttatgaactcataacagtgaaatcaatgcatctaatttgtctatttttcaaaactaatcatatcaattacatcagccaatcgtgtcaagaaactttattaaataacaggaaaatgatatgtttaaaataattaagatgaaataagaggattttacaatggctgaaaataatcaaaatagtttcgtaacaaagatagctacatacggcagttttattgcaattgcgtcgtttgtcattttatttataagtatatttttaaagttttcatttaatatcgagtttacagcaacaattatgaacatatgtcgctacactctaattctaggatttatacttatgtccttacctgatgttgttgataaaaacatcaagaagattatattcgatgcatttattatcatcgtctttatcttctttttactatagtagttttattttgtaattatacagttaatcatatttgtttcgtatcgaattcctgtgtgcattaaagataattctaatagaaaacagcagtaagacttttctgagtgatagcctccttactgctgtttttatttgtaacaatataatgacaggtactttatatttcactgtcaaagattattaatgattaacttatttaaattatgatttgaataaatagatatctaaatgcaatttgtcactattgatagttttattatcagcatacatttttaatacctcatgaccatactcaccatttaaattataaaaatcatattctacatttttttcatcatcattatgatatttaacataccctttaacaatgtcgccacctttttcgtacaacttatacttctcattcaaataatttcttaattgaacatctaattcttgaatggtaacaattttctttttcgtttttactgcagttagttctttttctgtttgatgtccgtcaatccataaattacaaggtatattcttataatcatcgtacttattattgtcacttaaagtaacaccaccataactacattgcgttttattggttgctcccccatgacattcatagctatagcttccagtatatatatcgatatttttatttataaattcatttgaaagtgcctcattttcgaattcaactttaaaatcctttttccaagcatcatttaagaacatgtcatgaaataacaaatcatgagtcaacagtctatcgtttgtttttttattttcaagatcagttggattagcaaatgacaccttagcattatatagacgctttgaatttagtttacttttatgatgtaagtctgaatattcgattgcacttgctgaatttgtcaaaattccttctaacaataatattaaaataaatcctgttaaatatttaacttcaaactccccaaaacaattattaatttacatttgagagcgagacataaatgataaagaaccgcttatggtttattatgtctcaggctcttatcctacattttgatttatgcatcacactcataatacttttcaatttgaaataccctgttcgcaattattagttgagctatatcaaccaatacagtgtaaacttaaaaattccaaaccgtttaacagtatatcagaaaaaatgataattatttcaattatttttattaaatttcataatgattcatataatattcacattaaaacatcacaatactgatacacaacaaaaagagcagtacacttgtcatgcaccactctcaacaaatatattttttcaatgaagcaattacgcaatcttacaaatactataagtatagctgaatcacatattacatttattttataatcgaatttagaaattcatcacttatctcataaattgttggtctacttttaattttaactaagtagttaccaaattttttaattgtattattaatttttactcttcctactcacaatatgttttctaaatcaattaatgttaatctatttcttttatttccaaacaatttatccattgaaaggaggtacaaaaattcataatctatctgtttataatgactagttaaataaagcgttaatttttcagtcgcatccatttttggtattaactcatcaagtattctttcttgtcctgctatcaataactcaagcattgtgtcaataaattccgtcaaatcaccacaattcaaatgatttgaagcagtcataaacgccttgtaatatttcgatttatttctatttatgacatatgaaaatgtcaaagcagtataattatcataataatcactcaagagcttggcaattataaatcttccaactctaccattgccatcataaaaaggatgtatatattcaaacagataatgactagccatgattttgaacggctgaggcgcatcaaaatattttaaaaatgttagcatttcacctatatattcaacaattttggtttcaggttgtaacccagcatgtatatatttattcgttgacccatcatgcataccaacaaaatttttacgaaatagctctccatctaacttatcttgttcgttaatttcatttgaaactaatttatcataaattgctctaatgtctcttacattatcaactttaatttttttattaagttctatctctttatattgatccacgaggcctctgaacttaagaaattctgatgcttggttgtttaacgcatgtgcaatctcttgtttagtactaaatacattttcaatttcattagtactttgtaattcatcgattaataagtcattaaaatattgttctctagctgcatatggtaaagaattaagtgctctatcaatttttctactattaattgatattaattcttgtttttttgatagatttttagtcaccataaagaatagaggatattctaaatcattaactttttttccattttccataggtatgatattaatattagtattgaaagaagctaaagaattaaatcttttaatatactcttccttcattttactttcattgtgttcatgaaaaatactttttaaagttctgtaacccatttgcaccctcctctacttatttaaaatgtatttttagctcaataaatccattttcattagattagctaaatattatcacttttttctttaaaaactatataaatatctattttctcaatcaatagaaaaagatttttcatcataacaaaaagagcagtacacttgtcatgcaccactctctcttaaaatatatctaattatgctttataaatgaatcaccggaaatcaaaatacatcttgcctaatactaacaacatttaaagtgatgctattagtcaaaatgtcttttaaaataactgaagtacttctttgaatgagaatatacctgtcaatattgtaacaagtactgcaacgataccaaagatgaacatccaatttgggtgtttataatcaccgacgattgatttctttttacttgcaatcaaaattgcacctaacgtaataggtaaaatccatccatttatcgcgcctgctataattaaaaggctgattggttttccaataaataagaaaatcattgttgaaataacgataaacacaatcacaattaaattacttctttcgttaagtgatttatgaagtgtttttaaaaatgttgcgcttgtgtatgctgagccaattactgatgacatagctgcagcaaataacacaataccaaaaatattctttccaattggtccaattgcgtgttcaaaaactgacgctggtggattttcagaacttagtgtcacacctgttacaacaactcctaataccgctaggaatagtaacgttctcataatacctgtagttaaaataccagcaattgctgattgatttacaaatggtaaatattgcttacctttaatgccagagtctaatatacgatgtgcacctgcaaaggtaatataaccacctacagttccaccaactaacgtaatgattggcaagactaatttcattggatgttctggcgcaaatgtatgcacaaaagcatcaccataaggtggattagaaacaaacatcacatatgccacaactaaaatcatcacaataccaagaatcattgaaacaacgtccatgattttttggccacttttacttacaaagattaatattgcaaagattgcagtaatagctgcgccccattttacatctaatccaaaaattgcatttaaacctaaaccggcaccagcaatattaccaatattaaaagctagaccaccaaatgcaatcaatattgagataacagtaccaagcccaggaacaactttatttgatatttcttgacctcttaaaccagttacaactaatatgcgccatatattaatttgtgcaccaatgtcaatgataatagacagtaatatggcaaatgcgaaacttgcaaaaaattgtgatgtaaatactgctgtttgcgttaaaaatgctggcccaattgcagaagttgccatcaaaaatacagaacctaataataaccttttatgatttttttgtgaattcaaagtcactttcttttttaagctttaaatttctccccattttttagccccctataaggattgaatatcaatgccttctttcattaaaatttctctaattttcgaaacaaataataatgcatgttctccatcaccatgcacacaaattgtatctgcttgtaacgttacttccttattgttttttgaaataactttattttccttcaccatcttcaaaacctgcttaagtgcttcgtcagtatcagtaatcacagcatcactttcttttctactaacgagctgcccatcatcttcgtatcgtctatcagcaaacacttcagaagctgtaattaatccgacattctttgcttctgaaattagatatgaatttgctaatcctactagcactagtgatggatcaaagtcataaacagcttgtgctataacgcttgctatttctctgtcttttgcacccatctgatacaatgcaccatgcggtttaacatgattaattttaacttgatgaatgcgacaaaacccttgtaatgcacctaattgataaatcatcaaattataaatctcctcgttagagatatctatatttcgtctgccaaaacctttcaaatcaggtaaaccaggatgtgcacctactgcaacattatgtgctttggcaagttttaccgtttcattcattacattttcatcaccagcgtgaaaaccacaagcaacattcgcacttgtaattaacggaataatttgatgatcaccaccaaaggaataatttccaaatgcttcgcctaaatcacaattcaaatcaactcgcattataattccacccctttaacaatttgatgtttttctaaaaatttaatatcaacatcttttgcatctccatcacgatatagtggataatttaaaactgcatataaaaaatcggcagttgtagaaaatccatctatcaccatttcatctaaggtggctttcaatttatcaattgctgaagctctatcatgagattttacaattactttagctactaaagaatcataatatggtgaaacttgataaccgtgatatagtaaagaatcgactcgcacattaaagccttgtggtaaatgtaacgctgtcactttacctggtgttggttgaaatttcttttcaggattttcggcatttattctcgcttctatcacatgaccattaaattgaatatcgctttgtgaaaaaggtaaatgattatgttccaataaatacatttgtgctgcaaccaaatcacgttctgctcgcatctctgtaacagtatgttcaacttgaattcgagcattcatttcaataaagtaatgtgcggtatcagttactaagaattcaatcgtacctgcacttctataatttgctgcacgtgcaactttaacagcatcgttacatatttgttgtcgtctttcttcagttaatgctgcacaaggagattcttcgattaatttttgatttttacgttgtacagaacaatcacgttcccctaaatgtacataattatcctgcccatcccccataacttgaacttcaacatgttttgcaacaggtataaaagcctcaacataaacacgatcatcatcaaagtatttttttccttcacttttagcttctttaaatgccttttctaaatcttcagctttctttacaatacgtatacctttaccaccaccgccactggcagctttgataacaactggataaccaatgtctttggcaagcttctcaatttcagacacatgattcacagcaccatttgatcctggaatcacaggaacacctgcatgatgaactgtttgtcttgctgttattttatcccccatcatttccatcgtttttttagtaggccctataaacgctatgccttgttcctcaacggtttgagcaaattttgttgattctgataaaaagccatatcctgggtgaattgcattagcaccagtgatttgtgcagcagatatgatgcggtcaatatttaaataactatccaaagcattagcttccccaatacatatagcttgatctgctaaatgtacatgcaagctttgctcgtccccttttgcataaactgctacagtttcaattccatattctctgcaagctcttataacccttacagcaatttcacctctgttcgcaattaaacaacgaatcatttacttaccccctttacttaatacgtaccaaaacttggtcgtattcaacatttgtgccgtgatcagctactatttcagtaatttctccagcaacatctgttgttacctcgtttaatactttcatcgcttcaacatatcctataatatctcccttgttaactttgtcaccgactttcacaattggttcagttaattctttactgtcttgtaaaaagaatgtacctaccattggtgatttaatgtcatgataatcatttgtcgaaacattggagttatcattcgcttttgaagctgtcaaatcattattgttcatactttgatttgattgattactgtgtgcagccaaatgattcgagtcagtgaagtcaatttctatttcaacttcaaaatttttatatttaaatttcttaacatcattttccttcactaatttgattatttgttcgattttttcaatattcattttacaaatccccttttaaaattgttgctaattttttcgaagtatgtcgcaagctagatgtatcaaaaattggagtcttttgatgactcttaagaatttcattaaacagagacatttgttcccgattcttatctacagcttcttggaatgatatccatttaaattgaattgtatcttgtggtttcatctgtgctaactttggcagatcaaatttgcatacagttgcaattttggtataaccacctatcgtttgtttatcattaagcagaataataggttgaccatcatttggcacttgaacactgccaagagcaaccggttcagaaatgatatctgcttgattaattggtgcaacgctgtcaccttccaaacgataccccatacggtctgattgttcagtgattaaatatggatgatttacaattttcgctctagcctcttcagaaaatgcctcgaattgaggtccttgaagaatgtgtataatattattttctggcaataaatcgtcctgtaaatgaatagtctttccaatgttttctttaaagtcattatttattttcactgttattacatcattagctaataactttctacctttgaatcctcctatactgcttcgggtatgtgttgcataactttcagcaataggaggtacgttgatagattgaccaaaagtaagataaccgcgtgcacctttggttatagcacctatttttaaaatgtcacctttctcagctaatatgacagaattcattgatatagttttattatttagcgaagcattaacactaccaccggttataacaaatgtattttgcgtattaaattgaatggtaggaccaatcaaagtatattcaatcgctggaccatcattgttaattaatgactgcgcaaccttaaaactaaattgatccatggcacctgcgcctgcaaatccaatatgttcataaccttttcttcctagatcttgtaccgttgaaaagagacctggttttaaaatcttaattgacattttcgatcaccacccagtcatcaacattaaagttgccatctgatatatctctttcgatttgtataaattcctgttcatctattgcataaaattgtatccattctcctgcttcatacattgacattggttcacgctcgctgctaaatacttttaacggtgtgcgtccaataatttgccatccgccaggagaatctgatggatatagtcctgtttgattattcgcaatacctacagaacctgcatgaatttttaaccttggctgattacgtctaggtgtatgtagttgttcatcaagtccgcctaagtatggaaatcctggcataaatcctagcatatatattaaataaggtttacttgtatgtttttcaataacttgctcaacagttattcgattatgctttgctacttcttcaatatcaggtccatatgtaccaccatattgaacaggtattttaataatacgattagtttgattcacagcatgaacattttttttattaaatttgttaagttctaaattttcaattaatttagaaggtgttataacttgttcgtcaaaatatattagaactgctcgatacgaagggacaatatcttgaatttctaatatttctttttctcgtatccaccgtaccattgctgtgacatttcgatatgtctcttcggatattttattttcaaaataaatcataattgtctgctcgttaataaatcttacatccactctaaatccccctttgtattgcaataaaccagtattgaataccttttcattgtatcattgagaagcacaagttgtttaataagtaattcaaatcgcatacaataacaaatgataatcaatttgttttcttggaaatattttgctttttttaaaatggagtagttaatattgaaactcttacactaatttaggttctgctatcaatcggtctgatggaaaatttttacttttcatctgtccgattttttgattttgaatataaaaaagcacgaccgaagtatcattaacacacttcaatcgcgcaattaaacaatctatttgaccatttattggatattaacaatttttacgttcatttcgccaccattaggtagtggaacacgaacttcatcatctaaacctttaccaattaacgctttagccattggtgattcatttgaaatcttaccattaaacgcatctgattcagctgaaccaacgatttgataactttcctcttcatcacctggtaattctacaaacgttactgttttaccaattttaacaacgttgttatctccagtatcttcaatgattaacgcatttcttaacatatgctcaattctttgaatatcttgttcgatgaaaccttgttcatcttttgctgcatcatactcagagttctctgataagtcaccaaatgaacgtgcaactttaattttctctacaacttcaggacgcttaactgtttttaattcttcaagttcacgctctaatttttcaaaaccttcttgagtcattggatattgcttttgattttccatattgtcatcttcctttactgaattatactattgcttgctaactaaagactgaatttttgttgtcataatatctattgcaactttattgctcccaccttcaggaataattatatcagcatatttcttagtcggttcaataaattggtcatgcataggtctaacaacacttaaatattgattgataacagagtccattgaacgcccacgctctttagtatctcgtgttaaacggcgtaatattctcaagtctgcatctgtatcaacatatattttaacatccatcatatcacgtaataccttattttctaaagcgaaaataccttctacgataataacatctttaggtttaaaatcaatggtaatgtcacttcttgtatgactagcataatcatatgtcggtacttctactgctttaccatttttcaagtctttaagattttcaattaataaatcattatcgaatgcaaatggatggtcataattggtttctaggcgctcgtcgaaagtcaagtgcttttgatctttataatagtaatcttgagcaagtaaagcgacactatgaccttctaagtttttcataatttcgttagttacagttgtttttcctgagccagatccaccagctatgccaatgattgtagtagctttcattagccaatttcctttctcatcatgttgtttggatatatcgggcgatccactttaatttgaacgatttgtaatggatggcgcgccgcgtctaagctgttaccttcttcatcataaattgcttctactacttgtgtaaatgtttcaatttctggaccaaagaattctatttcttgacctggtttaaagttatttcgttgttgaatagtcgcaatttttgtatcttcattataatctaataccaaaccgcaaaaatcaaatggtgattttttagattgttgttgaccaaacatctgttcttcataaccaggtgtaccctcaaagaatgctggtgcagtgtctctatttgcacatttatctaactcaattaaccattccggattaatcttaaagttatcaggatctgccgcatacgcatcaatgactttacgatatactgagacaactgttgcaatataatgaattgacttcatacgtccttcaatttttaatgagtccacaccaatatccatcatttgaggaatagattcgattaattttaaatctttagggctcatcgcaaacggtgtaacttcaccttgattataaaatacatcaagttcaccattatcatcaacttctaataattcataatcccaacgacaactttgacagcaaccgcctctgttggaatcccttgcagtcatatgattacttaatgtacatctacctgaataggcgatacacatagcaccatgaataaatgcttcgatttcaatatctactttttccttcatttcacgcatttccattgcgccggtctcacgtgctaatacaacacgatccaatccttcttctttccaatattctacagctttgtaattagaaagtgattgttgagtagataaatgaatttcaagttttggcgcaacttctttacatgtttcaataattaaaggatctgcaacaatgatacctgtcgcacctgtcttttccaaattacgcaaatatgattctagaccttcaatattctcatcatgtgcaataatatttgtcgtaacataaattttggcaccgtaatggttcgcaaattcaacaccttcagctatttcttccatcgtgaaattatcagcatttgaacgtaatccatattcttgaccacctaaaaatacggcatcagcgccataatgtactgctatttttaacttttctaagtttccagcaggtgctaataattctggtttcttcataactgttttaggagttgatttaatctcttctattgtcttcatgattaacctccttaatatactgtttgtttatataagaaaccttcgtcaaatggtcgatgatcaggttgaatttcttcaattgggtccatcaacataaatttctcatcttcatagatttcaggatcttcattgtacaaatctatcgcttgacgatactgttccgttaccacattaatatattcttctgtttgtagaataccatcgattttaaatgaatctatacccgcctcaaaaaatggtgctaattcttcaattaaacaaatgtcgtttggtgacataatatgcgtaccattgtaatcttcgtaaactgggtaattattttgtctttcttcatcataaagtaataaagattgttcatcattgcgacgttcaattttcatttgacgatcttggaacgtataataattgcctagtagcatacgctttgattggaacatacaagtcattccttgaacttgcacctcaatttccacatttgaattttcttttatattaataatttcatccaaattcagctcacgtgctaagacagctcttgatgcgcctcttttaccccagtaattacattgaaaatgattagttactaacgtctctgcattccaatgaagtggtattggattctcttgcgccttcacatacattactactgctggatccccgaaaataattctgtcaactcgtatttcatgtaaaaaattaatataatcttctacagcatctaaatgataattatgaaataatccattcaccgccgcatatacttttttatcgtttttgtgagctaatgcgacagcctctgtcatttgttgtctattgaattcccctggaagtcttaaaccaaacttttgctcgccaattacaaaagcatctgcacctaaatcaataagtgtttccatatggcttaatgacttgggtgtgacaagtaattctgtcatagtcattctcctttaattgaaatcgctaatccatcgtctatatttaaaaaattcgttgtatatcctggttgctttattaaccactcattataatcttgaacctttttaaccatttgtcttacatttctcgatctaacaatcccaatatccgatacaaaaccgtgatataaaacattatctgtaattacaagaccttggtgctttaaaagtggtgtatatatttcaaaaaatttctttgattgcgcttttgctgcatcaataaatatcatatcataaactttgtcatttacattttcaaattgctctaaagcattaccttcaataattcgaacctggttttcaaaatgataagtagctaaattttgtttagcatattgaatcatcgtttcattacgctctatcgttgtgacatgaatgtcatcagatatagaagcgaattgcatagaactatagccgattgctgtaccaatttctaaaatatttttaacattattcatacgaattaattgcttaattaaatctaatgttaaacgatctacgattggcacttcatttacttcggcaaattcacgcaaaacttcgattgaactattttgatgttgatgtaaatctattaaatattttttatttaggtcatccatgttttaaacttcctttatgtaaaataagtcaatatgattatgacaataaaataaatcagccttcacaattgattataattttgccaaccaattaaatgactgatttcgtgttagacgcaaagctattttatttatagaagcgaatcattcatataaaatttaactttagatattttaccatattttcaataaaattataagcgttaattatttatacattgcttgacttaaaaaaatactcttgcctacccatcttaaggttagcaagagtaaaatctttttaattattcttccatttcagtatttacaacttcttcaatcatgtcccattcttcatcagtttcgattggtactaacttaccaccgtcacctgactcatctggttcattgatcattggtacaagctcaatcatatcgtcttcatctgattgagcaccttcttcagctaagataacatactcttttttgaattcaggatgataaaattctaaaacttttcggtataaaacttcatttccttcttcatcgaataaagttaataattcttcttcgttattaatttctagttgtgaatcatgattatgttcagtcatagtaaaatctccttttaatgtagtgaatctaaatagccttgtaaaataaataccgctgccattttatcaatcacttgttttcttttttgtcttgaaacatctgcttctaataatgatcgttcagcagccattgtgcttaatctttcatcccacatcacaatctcaatagaaggataagcttctaataatttttctttatatgttaacgaagcttcgcctcgaaatcctattgaattattcatgtttttaggtagtcctattacgactgtacccacattatgttttttaataatgtctactaattggtcaatacctaattcattattttcttcattgattcggagtgtgtctaatccttgtgccgtccaacccattatatcactaattgcaattcctaccgttctactaccgacatcgagtcctaaaattttatgttgtaacataaattatttattttgctcttttaaatagtaagaaacaagctcttccataataacatctctatcaatatgacgaatttgatttcttgcttcattttggcgtggaatatacgcagggtcacctgataataaataacctacaatttggtttacggcattatatcctcgttcatctaatgttcgataaacattatttaaaacatctcttacatcttgtgttggaagttcttcatagtcgaatttcattgttttatcaaagttttccatttgcgacactcctttaattacaaatataactcactatcatcatacaatattatggctttaaattatagatttttaatgtaatctttaataaagcttaatgattttgagatattttcaggttgtgtaccgccaccttgagccatatctggacgaccgccacctttaccaccaacgattggtgccatttgtttgataagatcaccggctttaacattatttgttaaagatttagggacagttgcaaccatcgatactttatcatcaacattacttgcaagaatgataattgtatcttgtagtttagatttaaaatcgtccattgtcgagcgaattgctttcgcatttggtacatccacttcagtaaccaatactttatagccattgatttcttcaacttgatcttcaatattacccattttaagtgatgtgatttctttgtcacgttgctctaattgttttaataatgctttttcttcatcttgcaattgtgttaacttatcgactacttgatcatcagatttcactttcagctgtgatttcatcgtattaaatttctcttgaatatcttctaaatataagaaagctgctttacctgttaatgcttcaatacgacgcacaccagctcctgtacctgactcacttactattttgaataagccaatttcagaagtattgcggacatgaataccaccacataattcaattgaaaatggtgccatatttactacacgcacaacatcaccatatttttcaccgaataatgccattgcgcccatttctttagctgaagcaatatccatttcttgaatgttaacgtcaatacctttccaaatttcttcatttactaagcgttcaacttgatcaatttcatcattagtcattggaccaaaatgagagaaatcaaaacgtaaacgatctgcttctactagtgaaccagcttggttaacatgatcacccagtattgatttcaacgctgcatgtaataaatgtgttgcactatggttcttttgaatgtcacgtcgatcattttggttcacttcagcagacactgtagcgccaacatttacttggccaaattgtactactcctttatgcaagttttgaccatttggtgctttggttacttcactaacagcaatttcaaaattgtcattataaacaatacctgtatccgcaacttgtccaccactgactgcataaaatggtgtttccgttaacatgaagtatactgtttcacccgcttcaacttgtgaaacttcttcaccattatatatcaagtgtgttagtgttgtttgagctgtcgcagtatcataaccaacaaaagtacttgcagatgtaatatttttcaatacttcactttgaacttgcattgattgagaattttgacgtgcttgacgtgcacgatcacgttgttgttgcatttctgactcgaatgttgtcatatcaactttcaatcctgcttgcactgctatttcttcagttaattcaattgggaacccatacgtatcatacaatttaaatgcatctttcccattaatttcatttgttgtcactttagcttttttaattaattcatttaaaatcgctaaaccatcttctaatgtttcatggaatcgttcttcttcagactttataacacgcttaatgaaatctgctttttccttaacatttggataatatggttccataatgtctgcaacaatatcaacaagtttgtacataaatggctcattgattcctaacgtttgactaaaacgaacggcacgacgtaacaatcgacgtaatacatatcctctaccttcattggcaggtaatgcaccatcagaaattgcaaatgcaatcgtacgaatgtggtcagcaattactttaaatgccacatcttgttcgttgtttactaaatattgtttacctgatactttttcgatttcattcattataggcataaataaatctgtttcatagttagtacgtacattttgagaaactgaggccatacgctcaagccccatgccggtatcaatgtttttattaggtaatggtgtgtaactatgatctttattatgattgaattcactaaatactaagttccatacttcaagatagcgttcattttctccacctggatacatttcttctgccggatcgtcttgtccatatgcttctccgcgatcatagaaaatttcagtgttcggtcctgaaggcccttcaccaatatcccagaagttaccttcaatgcgaataatacgactttcttcaagtccaatatctttatgccaaatgttgtatgcttccatatcttccggatgaatcgtaacgtacaatttatctggctccatacccatccatttatcactcgttaaaaattcccaagcaaattcaatcgcttcttgtttaaagtaatcaccaattgagaagttacctaacatttcaaagaatgtatggtgacgcgctgtgaaaccaacattttcaatatcatttgtacgaatagctttttgagagtttacaattcttggctttttaggtgtttcacgtccatcaaaatatttctttaatgttgctacacctgaattaatccataataatgtatcatcatcaattggcactaatggtgcagaaggttcaaccatatgtcctttttcaacaaagaaatctagatatttttgtctaatttcactcgcttttaactttttcatcatttacacatcctatttactgtttttaaattaccattccataaaaattgatgacacagatagtcgatttgaaaaacttgtataaatcaatatcactttttattattaaaaataaaaaacgcccatcctcaaaagggacgaacgttatcgcggtaccaccctagttataaatgtaattcaacacatttatcactttaaatcgactatacagttgtgcataaagtagcgttcactaatgtttgttgtacttttcaccaaccagtacatctctgataaacaaatcattaactactcatctttatacgaatttaattctattttagttacatttacgcttgttgtcaacgttctataaagtcatacggcgtgatttctcccatattaatcattgggtcaattttaaacattgtagcttccgttaatacatttgtatctgtttttgttgaatcagacgtaacttcttcgctatcattcgatgacaatgaagcttctacttgatcatctattgtcgtttgtgaagctcctgtatcattagttgctgtgttttccggcatttcttcatcttctgaattaaaataatttttcaacaatgtacataattgtgttaaacgcgcttgaccatttgttttcaatccaatatcaaatgcttccggatcaccaagtaaaactaaactcgttttcgctctagttaaaccagtatataatatcggtctttgtaacattctaaaatactgtttaacaataggcatgataacaataggaaattctgaaccttgtgatttatggattgatgtacaatatgcatgtgttaattccatcatatcttgtttcgtaaatgtaatttcattaccttcaaaatccacaacaagtacatctttattaagggcattttctttcgcccaaaaaataccaacaataactcctatgtcaccattaaatatgttatcatttggcctattaacaagttgtaatactttgtcaccttttctaaagactacatcaccaaactcaatttctcgtgtgtctttctttttagggtttaaaatatcttgtaaaacttgatttaaacgtttaataccagcatttcctttatacattggtgcaagcacttgaatatcagccatagtataccctttattaacagcactagtaactactttctcaacaactgttggtatttggtttgcctgacagttaataaagcttctatcatgaaaacgctgtgtaatatcaattttctgacccaacttcattcgatgtgctaattctataatgcttgaaccatcttgttgacgatatacttcagtcagattaactcgtggtatagctttcgattcaattaaatctttaaatacttgaccagggcctacagaaggcaattggtcctcatcacctacaaatatcaattgtgcatctaaaggaaccgcacttaaaaattggtggaacaaccaagtatctaccatagacatctcatcaatgattatgagtcgtgcgtttatttcattttctaatatatcctctggctttgtgtcttgattccaacctattaaacgatgaatcgtcattgcttctaatccagttgactcttgtagtctcttggacgctcttcctgttggcgctgctaatacaactggataatcatcattgacataatcatcataatctaatgataagccatgaatctcagcatataattctacaatgcctttaattactgtcgtctttcctgttcccggtccaccggttaatagcatcaccttagaattgatagccgtttgcaaagcttctttttgtgaagctgcatagttcacttgattcgcatcttctatttcaccaatatgcatttgtaaatctgactgttcaatttccgtaagtttatttgtatgcgtctttattctgaataagttttgaacacttttgatttcagaataatacaaacttggaattgcaacttgttcattgtcaataattagtcgtttttcctcatttaaatattgcaacatttcgtctaatttttcaggttcgatgacttcttcatcttgataatttaatacatcaacggttaagtctataacaacattgataggcaaatatgtatgtccctgtttaatacattcttcttctaacgtatagagcaacgcagcttttaatcgttcattatcgttataagcgataccaatatttctagcaagttgatctgctttattaaaaccaatacctttaatatcataaatcaattgatatggatttcgatctaaaatagtcagtgtatcaccgagataaaactgataaattgccattgaaagtttaggaccaaaccctaaatcatgtaaacgaatcattattttttcagattcttgatttgctgaaatttgttctgcaatttgtttctgtttctttttagataatcccgaaactttttctagaactgaatggtcatctaatatatcatttatcgcattatcacctaatgtattaacaatattttgagctgtctttttacctacacctttaaacaaatcacttgataaataacttataattgcttctttcgtttgtggcatttctttttcaaaagtctctgcttttaattgtttaccataacggggatgatcaacaacttgacctttaaatgtgtagacatcgccttcaacaatattcggaagaaaccctacaacagttggcattgtatcaaagtcttcatttgtttcaatagtatctactttaagcactgtataaaaattatcactgttttgaaacaatatcgcttcaacagtacctttgatcattgaataatcaaatagtgtagggtctgacatgttactcctcctctttcattttagtgaatgttttcagcgcatgctgacttaataagtgtttagggtcgatagtcacagcttctttaaaatgagttatggcttcatcaatatcttcatttttcataaataacgctaaacctaaattgtatcttgcatcaacatgatttttatcaatcgttaatacatgtttaagttgagttatggcttcattaaacatttctaattgacataatacaagaccatattgaaattgaacttctgcatctttgtctttatctagttccgcagcagtcattaaatacggcaatgccagcttaaatgattctaactgattaaacgccataccgatcatataattacaatcaacttgttcaatctctgtttgtaatgcttgttgatataatttaatagcttcttgataacgttgctgattataatatacatttgctagattataaaatacgacgccattcttcggatctattgttaaagctttttgaaaaaaacgctctgccttttcaatctcattcgcatcagcaagtacgataccggcattaatataattttcaataattgtaggatcttcttcgatatttccgaacaatgcttgtaacgcttcttctatttttccattttgtatgtattgataaattgtttgttgatctatcatttacgaacctcatttctcatcaattataacatcttgataaattgtatgtctcgaatcacttaacaacgaataaaatataatctaatatcatcttcattcatgaaaaagcgggaatggaatagaaatgctaaagaaccattaacggtttattatgtaatggttcttccgcattagccaccactattatgtacttaaaaataggaatacacaattagactcatgcatagggagtgggacagaaatgatatttttacaaaattaatttgtttaccccaacttgcattgcctgtagaatttctttacgaaattctctatgttggggccccgtccccaacttgcattgcctgttgaatttctttaccaaattctctgtgttggggccccatccccaacttgcacattattgaaatctgactttccgtcagcttctgtgttggggccccgccaacttgcattgcctgtttaaattggggttccaatttctctatgttggggccctcctgccaatataacattgtagagcctaggacattgtgatgtcccagactctatcatcatgaattattctcatcaaaaactgtctttcgtcatttccaacgctgaaacttcaaataagtaatttattgttcccattgtttatacaacataatttaattgaccttcatttttgaacacatcgtcaattgttgcaccaccaagacacacatcaccttgataaaaaacaactgcttgtccaggtgtgattgctcttactggctcagcaaaagtaacacgcagtgcatggtcgttttcacgtttcacaaaaactttcgtatctttttggcgatatctaaatttagctgtacattcaaaaccttgatctaagtcattatcttctggatttacaaatgaatagtctgaagcaattaagtaatcactgtataatgcatcgtgatggaatccttgttctacatataaaacattatcttttagatttttaccgacaacaaaccaaggatcgccatctccacctatacctaaaccatgtctttgtcctattgtgtaatacatcaaaccactatgtttacccattttcttaccatcaagtgttatcatattacccggttgtgcaggtaaatattgtgataaaaatgttttaaagtttttttcgccgataaaacaaatgcctgtagaatcttttttcttagcagtaacaagtccttgttcttcagcaattcgacgcacttcactcttttcgatgtcaccaattgggaacatcacttttgaaagttgttgttgagataattgattcaagaagtatgtttgatctttattattatctacaccacgtaacatttcaacatgaccatcttcatgacgatgtatgcgtgcgtaatgtcctgtcgctacataatctgcacctaaattcatcgcatgatctaaaaaggctttaaacttaatttctttattacacataacgtctggatttggagtacgaccttttttgtattcatctaagaaatacgtaaagactttatcccaatattctttttcaaaattaacagcgtaatatggaatgccaatttgattacacacttcaataacatcgttgtaatcttcagttgcagtacatacgccattttcgtcagtgtcatcccagtttttcataaatatgccaatgacatcataaccttgttcttttaagacgtgggctgttacagaactatctacaccgcctgacataccaacgacaacacgtatatctttatttgacaattatgactcctccttaaatttaaaatatattttatgaatttcagctacaattgcattaatttcattttcagtagtcaattcgttaaaactaaatcgaatcgaatgatttgatcgctcctcatcttcgaacattgcatctaaaacatgcgacggttgtgtagagcctgctgtacatgcagatccagacgacacatagatttgtgccatatccaacaatgttaacatcgtttcaacttcaacaaacggaaaatatagatttacaatatggcctgtagcatccgtcattgaaccatttaattcaaatggaatcgatctttcttgtaatttaactaaaaattgttcttttaaattcattaaatgaatattgttatcgtctcgattcttttctgctaattgtaatgctttagccatcccgacaatttgtgcaagattttcagtacctgcacggcgtttcaattcttgttcaccgccaagttgaggataatctaatgtgacatggtctttaactaataatgcaccgacaccttttggtcctccaaacttatgagcagtaatactcattgcgtcgatctcaaattcgtcaaacttaacatcaagatgtccaattgcttgaaccgcatcaacatggaaatatgcatttgtctcagcaataatatcttgaatatcataaatttgttgcactgtgccaacttcattatttacaaacataatagatactaaaatcgtcttatctgtaattgtttcttcaagttggtctaaatcaatagcacctgtatcatcaacatctagatatgttacatcaaaaccttctcgctctaattgttcaaaaacatgtaacacagaatgatgttcaatcttcgatgtgataatgtgattacccaattgttcatttgcttttactatgcctttaattgctgtattattcgattctgttgcaccactcgtaaatataatttcatgtgtatctgcaccaagtaattgtgcaatttgacgtcttgactcatctaaatatttacgcgcatctcttcccttagcatgtattgatgatggattaccataatgcgaattgtaaatcgtcatcatcgcatctactacttcaggttttactggtgtggtcgcagcataatctgcataaatttccatgtttggacactcctcacaattttatcaatgttccaataatagcaccttacatactatttttctacttttctgtttaactttatttataatgtttttaattatattttaccattttctacacatgcttttcgataggcttttttaagtttatcgctttattcttgtcttttttataaattttagtatttgcagatattttttcatttgtaaaatgtaacgtactattattttggttatgagcaatttaatatttatctggttattcgattggtatacttcttatatcataaaaaaggaaggacgatacaaaaatggcgattaaatattcagcattaaaccttgtccctattcgagaaggtgaagatgaacgaacagcaattaatgatatggttaagctcgcacaacatttagacgaattatcatatgaaagatattggattgctgaacaccataacgctcccaacctagtaagttcagcaactgctttattaattcaacatacgttagaacatacgaaacacatacgtgtaggttctggaggaatcatgttacctaaccatgctccattaatcgttgcggaacaatttggcacgatggcaacattatttccaaatcgtgtcgatttaggattaggacgtgcacctggaacagatatgatgaccgcaagtgcattaagacgagatcaacatgatggtgtttataaatttccagaagaggtttcattattacaacaatatttcggccctgctcaccaacaagcatatgttcgtgcttatccagcagtaggtaaaaatgtgcctttatacattcttggttcttcaacagattctgcacatttagctgctcgcaaagggcttccatatgtgttcgctggacattttgcacctcaacaaatgaaagaagctatcgaaatttacaaaacgttatttgaaccttctgatgtattagacgaaccttatgttattgtatgtttaaatacaatcgttgctgaaaatgatgacgaagcacaatatttagcttcatctatggcacaagtaatggttagtatcactcgtggcagaatgcagcccgttcaaccgccaacacatgaactacaaaatatattaacgccgagagaatacgcgatggctatggaaagacagaaaatatcattaataggttcagaaaatactgttcaacaaaaaattcaagattttatggaaacttatggtgaagtcaacgaaattatggcaataagttatatttatgataaagatatgcaattagactcttatcgtcggttcaagaatgttataaatcagataaatgaaaaaagcactttataatgtgataaataaactaagtgaaagtatgtatccataatattaataaaaatatacagtaacagcattttgaatgaaagatgtctttattgttcgatcatttattttagtaatgattcaaattcacttaaaattctaatgcaaatatgaaagcgccccttcaactttacactgtgtaagtgtttatttgatggggcgctttcaaaatattgaaaagcatatccaaaatttaaagaattttatttctctttatcttcattttcttttttctcttcgttattcgaacctgtatattcatttatcttatcttttacatttttaacttgttcattatcactatttttaaatttttctactgcgtctttagctttatccataaaactcatattaatcgctcctcttatatttgattagtttaattgaacttattttttaagtttatcaattgcatcagttattttgtttttagcattttcaacaacttcttttgctttaccagtcgctttatcttgctgaccttctttttctaattctttgttgtcagtaacgttacctactgtttctttaacattgcctttaaattgatcgaacttactttcgtctgccatagtgaaacctccttagatgtatatatttatataccacaaaggaggttcgctaaacattataatatgaagtttttatgttatagtatagtatttatacgattaaatataaaacatgtatccgtctaaatcttcacttgtatctacatattccgctaaatatttcaatgttgtattatctaaaacatctctcactgcatctctcatgcgaatccatagttgtttttgcgcaggtggttctgattcaatactttcaacaaatgtaattggaccttctaacagtcttataatatcccctgctgagatttcttccgctggtactcttaattggtatccacctttagcaccgcgtacacttcgaattaaccccgcatttcttaaaggacctacaagctgttctaaatataaatcactcaaattattttcttcagcaattgactttaatgatatacatccttgcccctcttttttagcaagagaaatcatcaatgtaagtccatatctccctttagtagaaattttcattgtataacctcacttaattcgaatattgatattcccattttagcattttttgagttaagatagtataagaaaggtgtgacaaatgtgagtacagaaccattagcatcgagaatgcgcccaaaaaatatagatgaaatcatttcccaacaacatttagttggaccaagaggcattatcagaagaatggttgatacaaaaaaattaacttcaatgattttttatggtccacctggtataggcaaaacaagtattgccaaagcaatttcgggcagtacgcaatataaattcagacaattgaatgctgtaactaacactaaaaaagatatgcaacttgttgttgaagaagctaaaatgtctggtcaagttatcttgttattagatgaaatacatcgactagataaagctaaacaagactttttattacctcatttagaaaatggcaaaatcgtcttgatcggtgctacaacttcaaatccttatcatgctatcaatccagcgattcgttcaagagcgcaaatttttgagttatatcctttaaatgatgaagatgtgcgccaagcgttaactcgtgcaatagaggatgaagagaatggtttaaaaacatatcaacccaaaattgatgaagatgccatggcctacttttctacacaaagtcaaggtgatgttcgtagtgcgttaaatgcattggaattagctgtattaagcgcagataatgacaaagacggttatcgacatgttacattgcaagatgctaaagattgtttacaaaaaggtgcatttgtaagtgataaagatggtgacatgcattacgatgttatgagcgctttccaaaaatctatccgtggtagcgacgtcaatgccgctttacattatttagcacgattaattgaagctggagatttacctacaatagttcgacgattacttgtaattagctacgaggatataggcttagcctcacctaatgctggtcagagaacacttgctgctattgaatcagcagaacgtctaggtttaccagaagctaggataccactaagccaagcagtaatcgaactatgcttatcacctaagtcaaattcagcaatgagtgccattgatagtgcattgtccgatattagaaacggtcatgtgggccaaattccaaaccatttaaaagatggacattatcaaggtgctaaagatctaggccgatctattggttacaaatatccacaccaatatgttaatggctatgtttcacagcaatatttacctgataaactaaaaaacaaaatttattatgaaccaaaaacgacatctaaaagtgaacaacaactcaaagaaatatataacaacttacttaaacaaaggccgtaaaaataagattaaatcgattacctttgatattttagctataatcaaatcaaaactgactagtacacgaggcatattctactatgcttgcgaactagtcagttttagttttatggtgtggttacacttgccttacgttgaaaattatccctttcaaaattaattattgccctttgtctttaatgcgacgaactggaatatcttttaatacgtcattcaccacataacttgcacaaattaatccaacaacacttggcacaaaggcatttgaagaaggtggcatttgtccttttcgattgatagcatttttatctccaactatatcttttacatcttctcttatgacaattggactttcatctgaaaatacaactggaatccctttacgaatccctagtttttttaatttttgacgaataattttggccattggatcggtatgtgttttagagatatctgaaattgtaaaacgtgttggatctgttttatttgcagcacccatactggaaatcactttaatccctcggtcaagacactctttcattaagtgtactttgtacattattgtatcacttgcatctacaaaataatctatatcgtaattatcgaaaatttcttcatatgtctcttctgtataaaacatatgtaaaggcgtgactttacaatctggattaattaatttaatacgttcttccatcaaagaaactttactttgtcctaccgttgtagttaaagcgtgtaattgtctgtttacatttgtaatatcaacatcatctttatctattaatataatatgaccaatattcgttcttgctaatgcttcagcagcaaatgaaccaacacctccaacgccgagtatgacaactgtttgttgcttcaataaatctaaaccttgttgtccaatcgctagttcatttcttgaaaattgatgtttcattattttacctctttcactgatttatacataagtacatagtaacttaaaattttatatttagcattattgctttgattatttttccaaaattcaacgaggaaacaattattaaacgctattaaacccaactaattctttattaaaaacttaaagaaaagcataaaaatacgcaagacaaagtcttgcgtatcgatagaatccgtattgccgtagttataatagcttgatcattcggcctgttatatacaggtgggtgccctgtttcttgttttgtacgtccttcatataaggcgtgtacgctgcaagaaaacccattgggctcccttgatcaaagagtgttaggcccaaattaaaaagcaaacttacgaacaactcagatgactatcttatgatgttatattaccacataattaaaattaatgaaattataacaaaccaaagtttattgattttttaaaatttagtgacgaattcgcaaagaaagttcttctaattgtttatcagaaacttcaccaggcgcattcgttaataaacatgtagcagatgctgttttagggaatgcaattgtatctctcaagtttgttctattagtcaataacatgactaatcggtctaatcctaatgcaataccgccatgaggtggtgcaccatatttaaatgcatctagtaagaagccgaattgttcctgtgcttgttctttagtaaatccaagaacttcgaacattttttcttgtaactcaccgtcatgaattctgattgaaccgccacctaattcataaccatttaatactatgtcataagcgtttgcctcagcttcttctggcgcagtaccaagcttagcaatatcagcttcttttggagatgtaaatggatgatgtgctgcaacgtaacgtttcgcatcttcatcatattctaataatggccaatctgtcacccataagaagtttaattttgtttcatcgattaaacctaattctttagctaatttgacacgtaatgcacctaaactttgtgcaacgacatttggtttgtctgcaacaaacattactaagtcaccagcttcagcaccagttaatgtaagtaatgtttcaacattttctgtttcaaagaaacgtccaattggacctgtcaaaccatcttccacaactttaacccacgctaaacctttagcaccatagatgtttacaaattctgttaaagcatccatatctttacgagtatattgttcagctgcacctttggcgacaattgctttaatttcaccatcattttcaacagtatctttaaatactttaaagtccatatcacgtcctaattgagaaacgtcaattaattccatttcaaaacgcgtatctggtttatcagaaccatagcgacgcatcgcttctttatatgtcatgcgtgggaaagcgccattaatttcaacgcctttaacttctttaacaacttttttaagcatttcttcacccatttgcatcacatcttcttgatctacaaaactcatttcaatatcgacttgtgtgaattcaggttgacgatctgcacgtaaatcttcgtcacggaagcattttacgatttggtagtatttgtcaaatccgctaatcatcaataactgcttaaataattgtggcgattgtggtaatgcataaaattcaccatcatggacacgagatggtactaaatagtcacgtgcaccctcaggtgttgacttcgttagtactggtgtttcgatgtcaaagaacccttcatcatccaaatattgacgaatagaacgagtaatttgatgtctcattttaaatgtttgcgctaactcttgacgacgtaaatctaaataacggtattttaatcgaatattttcatcaacgttaacattttcttcatttatagaaaatggtggtgtctcagatttattaatcactttaatatttgtaacttgtacttcaacttggccagttttaattttagggttaactgtttcagggtcacgcttcgtaactgtaccttgaacttctacaacatattcagaacgtactgtttcagcaattttcaatgcctcttctgaaaatgcgggattaaacacgacttgtacaattccttctctatctcttaaatcaacgaaaatcaatccaccaaggtcacgacgattgttaacccatccttttaatgtaatttcttgtcctaaaaatgcttcagtaactaatccacaataagttgttctcttactcatattttaacgccctctctacttcttaaaatattcgactaatgcgtctaattcaattgtttcagattcaccagttgtcatatttttaacatcgattttattattttctaattcttgatcaccaataacgattgtaaacttggcacctaaacggtctgcttgtttcatttgtcctttaattttacgctgtaagtagtctttatctgctttaataccattatgtctcaaatgatttaataacttcacagcatatcgatctgcttgatcacccattgtaacaatgaataaatctaagttttcttcaatatctaattcgataccttcttcttcaagtgcaagcaataatcgttctatacttagcgcaaaaccaatacctgtttcgcttggaccatctagcaattctaataaaccattataacggccaccaccacaaagagttgtaatggcaccatcatagtttgggttatccatcattaattcaaatgctgtatgtgtataataatccaatccacgaactaagttaggatcttcaatatatggaatacctaaatcatctaaataagcttttacttgttcataatatgccttagattcctcatttaagaaatcagtgattctaggtgcagtcttaatcgcttctttatcacggtctactttacaatccaaaattcgcatcggatttgtatgcaaacgtgattgacaatctgaacaaaattcatgaattactggttcaaagtgtttcactaacgcttcgttatattcttttcgagacgccatatcccctacactattaataacaagctttaaatgttttaatccaaatgattgataaatatgcataaccatagctaatacttctgcatctacgctaggattttcagcaccaatagcttctacaccaaattgattaaattgacgatagcgccctttttgcttacgttcatatctaaacatcggtccattgtaataaagtttaattggttggtttggattaccttgcattttatgttcaatatatgaacgcacaactgcagctgttccctcaggtcttaatgtaatacttctgtcgcctttatctttaaatgtatacatttctttttgtacgacatcggttgaatcaccaacacctcttgcaaaaagatctgtactttcaaaaattggtgttcttatttctttataattataaaatgtcattaattcatctaattgattttcaatgtaacgccatttctttgaatcttcaggtaaaatatcctgcgtccctctaggtattttaatcattttgacatctccctcggcaaactattttatttaattacctttttaaaactaaaactatataagacaacttaactttgcacgataaatcataattttaaaagcaaaagaaaaagcccttgcacagcctgaaactgcacaagggacgaatatccgtgttgccaccctcattggtttaaaaaacatgcctaattgtaatcatcattactttttataagcgtgcatttaataaacccactcaaaacgtttaacgtacgtttaacggctttacttttcataaagcacctcttcttgtgttcaatgtatataaactactcagcataatctttcagtctatggattatattcctacacaatcttagttagattgctacctatttcatttaccatttcaagaatactaacggttttagttataaaattcaatatcaatgataactactttcacatatttttgcaagccctacgcagaaaaataaattttaaggccatcaacaattgcttgttctaaaatttgtctatgtaattgatctttaatcatcgtttcatcagttgggttactaatataacctaattctaataaaacagcaggaacttttgtttgtcttaacacttgataattttcttgtcttgaaccgcgattagaaagtagacctttcttctgaatcgtagcgtctaacgtatctgctaaagctctttgattatcatgataccaataaactgtcattccatttgcattagatgattctaatgcatcattatgtatactcaaataggcatcgcctttgatatcacgattttctagtgaaacatatgtatcgtctgttcttgtcatcttaacagttgcgccttctttttctaaagtgcgttgcaattcttttgctgttttcaacgtataatctttttctaagcttttatatttagtattgcttgaagcaccctggtcactacctccatgaccaggatcaagcactattgttttaccttgcaaaggatttttctcctttgtattatccgcgacaatatataaatttgtgtgccatccagctatccaacctttttcattactggatgtatcttcaacttcaatccatttacctactttaccaatctttttaaaatggtcacctttctcaaccttgtaaatgactggatacgcagcgtttggacctgtacgtaattcagcattttcagttatcgtaatgttcccactatcttcactattgctattcagcaataaaaataaaaagatgataaataagacaaaggcaatcactactattagagtacgtttatttttaagaccctttttagataaccatgcctctatttttttcattgaattttgccgtcctgactttcataaataatagtgactggaccatcattatttatgttaacattcatgtgtgttccaaattcacctgttttcacagtaagaccatacgctcgtagcgcatcattaaaatactcatatatttttactgcttgatcaggatttttagaatttgagaaacctggacggttacctttttttacatctgcatagagagtaaattgtgaaactgatagtatttcaccattcacttgttggatattaaagtttaatttattattgtcatcttcaaataatcttgcattagcaattttctttgcaattacatctgcatcttgctctgtagagtcctgaccgataccgactaataaacaatatccttttttgatttgattatttaatgtatcattcgtcaccgatgcttctttaactctttgtacaactactttcatattttgcacctctagttccaaactcttgttactgtataaacatcaccaagttgtttgatcttttctaccacacgataaacatcattcacgtttttcaccatgacactaatatttattattgcatttttatcaatatctgaacgtcctgaaactttaattaaattgccggctgtcgagctaacagcttgtaggacttcattcaacaaaccatttcggtcatacgcagttacctctaaatcaacctgatatttttgagttgcgtcttttgattttacccattcaacattaattagtcgttcagtttcgttcttaatatttgggcaatcagtgcgatgtactttaataccgtgacctttggtgatataacctacaatatcatcacctggtataggattacaacattttgacaacttgataagcacattttctaaaccttctacatagacaccactatcagtaatgatgttgtctttaataggcaatgatttcgtaacttcttgtgcttcatttaaagcacgttgcttatctaaaatacgttgtctttcagttaatttattaacaatctgtaaggatgtcacgccgccaaatcctacagctgcgaataaatcatcttcatttgcaaagttatatttttcattaacaacctgaatatttttctctgtcaaaatatcttcgactctaaatccttgctcttttatttcagcttcaaccatcattcggcctttttcaatattagatgaacgatcttgttttttgaagaaacttttaattttacctttggcactagacgatttaacaattttcaaccaatcacgacttggtccatatgaatgtttactagtacgtatttcaacaatatcgcctgtttgtaaaatatagtcaattggtacaattttgccattcaccttggcaccaatcatcttattacctacttcactgtgaatcgcataagcaaaatcaatcggcacagcaccatatggcaactcaataacatcactcgctggggtaaatgcgtatactttgtcactctgtaagtcatattttaaggtttccataaattcttgagcgtcagacgatgtatgatccgcttcagctaattcttttaaccaatttaacttattttgataagtttgatctttttcacttacttttttaccttctttgtaagcccagtgtgctgcaacaccatgttcagcaatttcgtgcatatcaaacgttcgtatttggatttcgagcgggtctccatttggacctactactgtagtatgcaatgactgatacaaattttgtttaggcattgcaatataatctttaaaacgtcctggcatcggtttccataacgtatgcaccaacccaagtatcgcataacaatcattaatagaattgacaataacacgtatcgccaacaaatcaaaaatttgatcaaattgctttttctgcttcatcattttccgataaatactgtaaatatgtttaggtctaccatttatatcgccttcaatattcattcggtccatttcagtacgtattctatcaatagccgtttcgatatacgcttcacgttcactacgtttcttcttcattaaattgactattctaaaatattgtacattatcaatataacgaagagccgtatcttctagttcccatttgattgtattaataccaagacgatgtgctaaaggtgcataaatttctaatgtttctcgagaaattctaatttgtttttcgcgcggcatggctttcaaggtacgcatattatgtaatctgtctgctaatttcaccaaaattacgcgtacatctttggcaatcgcaataaataacttgcgatgattttcagcttgctgttcttcttttgagcggtattttacttttttaagcttcgtcacaccatcaacaattcgagcaacttcttcattgaacatttcttttacatcttcaaatgtatacggtgtatcttcaattacatcatgcaaaaaacctgcgacaatcgttggtccgtctaatcgcatttctgttaaaatacctgcaacttgtataggatgcataatgtatggtaatccgttttttcggaactgacctttatgtgcttcataagcaatatgatagctttttaaaacatactcatattcatctgctgacaaatatgattttgctttgtgaagaacttcgtctgcactatatggatattcgttgttcattatatgatacaccccattcatatttattacttcgccttaaacaatgatttaggtactcttgttgaatagtatttgtcccacaccaatcatacgtccgtcgacgataaatatttatcctgtcgtcattaatcgtaatattaattttacttgagcgagtttaatttgtatactattcctacttttaaaacttttacaaaaattcgacctaaatctactgtttcattttttaaatattagttctatgatactacaatttatgaaataaataaacgatgttattaaggtataatgctcaatcatctaacattttcagtaaataaaaaatcctaacatctcagttaagaaaacttaaacaacttttttaattaagtcattcgttcttatacatttgatgaaggatttcatttgataaaattatattattttttattcgtcgtaagagattaaactcataacatcgtaatctttaattttttcaataccatttaaatatttcaattcaattataaatgcaatacctactacgataccgcctaatttttcgactaattttattgctgcttcaatcgtaccaccagtagctaataaatcatctgtaattaacacacgttgacctggtttaattgcatctttgtgcattgttaaaacatttgtaccatattctaggtcatactcataacgaatgacttcacgaggtaatttcccttcttttctaacaggtgcaaagccaatccccattgaataagctacaggacagccaatgataaagccacgcgcttcaggtcctacaacgatatcaacatctctgtcttttgcgtattctacaattttatttgttgcatagccatatgcttcaccattatccataattgtagtaatatccttgaaactaacacctggtttcggccaatcttgaacttctgatacgtattgctttaaatccattaatatttcctcctaaattgctcacgacaattgtgactttatccaattttttatttctgaaaaatcttgatataataattgcttttcaacatccatacgttgttgtcttaattgatacactttgctggaatcaatcgatcttttatcaggttgttgattgattcgaattaaaccatcttcttgtgttacaaaatttaagtctaagaaaactttcaacatgaatttaagtgtatctggtttcacacttaaatgttgacacaataacataccctctttctggatatttgtttcttgtttagttattaatgctttataacactttttaaaaacatccatattaggtataccatcgaagtaaatcgaatgattatgttgcaaaactatataaagttgagaaaattgcagttgttgcagggaattagacaaatcttccatcgacgtaggtaaatctcttaatactactttatcagtttgttgtttaatttcttcaccataataatattcattcgcatttactttatcacttttaggatgaataagcacgacaatattttcatcattttctgtaaaaggtaaactttttcgtttacttctataatctaatatttgctgttcattcatcgcaatatcttgaataattaattgcggtgattgattaccattccattcgttgatttgaacagatcctaatatattaattggctgttcatcttgcaactcaggttctaagtgtccattttgccaaaatagtgcggcgatattactttcaccaagcgtcaattttagatgatttttttgttgacctatcgccttaactgaagaaactgataaatcatccatttcaaaaataggtctaggaaaatctgttccgaagggtcttaaacgattcatatcacgaatatttttaatcgttatatcattttctgttaataatacatctaccggctttacgggatctaacgaagttgttttagataattctttcatccatttatttaaaccttcagctaacgattctatattatcaatatccatcgtcatacctgctgccatatgatggccgccaaatttagcgattaactcttggtgtgctgatagtatttcaaacatcgacacttgatcaattgatctggcggaaccttttgcatgattttgctccctatcaatatttaaaattaatgttggcaaagcaaatgtttcgacaattttcgaagcaacaatacctaagacaccttcatgccaattttcttttgctaaaagtaaaaataaatctccatttttaactttcatttctgccattgccattgcttcttctgtgatagttgctacaatatcttttctttcacggttaaaatgttcaacttgttctgctaaaaatgcagcttcttcttcgtcgtcagtcatcaacaattcgcaagctaatgatgcgtcatctaaacgacctacagcattaagtctaggtccaataataaaaccaattgtttcttcatcaatattgtcattgtatcccgcttcttttagcaatgctttaacagaggtcggacattgatcatttaagacttttaatccttgtttcactaatgatcgattttcatcagttaaggatactaaatccgcaatggtacctatcgcaactaatgctttaaaataatcaggtacattttcaatcaatgcttgtgctaatttgtacgcaacacctgcaccacacaattgttggaacggataattaaacgatggatgcattggatgtacgattgcatatgcttctggtaatgtactaccaatttcatgatgatcagttacaatgacatcaactcctaaatcttgaaccatcttaatttcattatgaccttgtatgccattatcaacagttatgattaatgttatgccttcatcatgagcatttctaaatgctagttcgtttggtccatatccttcggtaaagcggttaggaatatgccatcctacttgtgcacctaaaagttgtaatgttgtcactaaaattgtagttgaggtaacaccgtcggcatcgtaatcaccataaactaggattttctcatcattcgctattgctcttttaattctttcaatagtcttagtcatatcgctcaattgcagtgaatcatgattgatatctgtatctgaaatgatggattcaattgcttgttcatcaataatcgatttactttctaatattttttttacgattggcgttaactttaattttgatgttaattcatcacttatgtattcagttggtttatttaatttccacttatacttcggtttaatcatatatatttacgcctcatttccaaaagacattatatctaaaattactttaaataaaaagcacttatctaaataatcaagactttaattataccattttttaaaaatgaatgcgggaacttatttatatatattttgttaaatttaaacaaagtaaaaagcggtatgtgaactctttattgtttcacataccgcttaattcattttaaactaaaatcttttcatcgttcgatttcttttctttatatacaactaatttgtgtttcggcgattttttcaactgacgttttttcatcattccccatagcggaacggcaatgaagattgaagagaatacaccagaaatcaatccgataaataatgctaaagtaaagttgaatatcgtaggagcaccgaagaatagtatagcgactactactacaataactgttaatactgtattaattgaacgtgtcattgtctgtctaattgatctattaacgatatcatcaatttgttctgttgtcgtaatcactttaaccttttgtaagttttcacgtacacggtcaaacgttacgattgtatcattaattgaataaccgacaattgttaatacagcggcgataaatgttaaatctacttcaattctaaataaactgaaaatcgctactataatgaatacatcatgtaataatgccaatacagatgaaagacccatgcgccattcaaatcgtaatgatacatagatgatgatacctatcgatgcatagattaatgcaagcattgcattttttgctaattcctgtccaataattggtgatacagtgttaatttgaggtgtgtcaccgaatttcgatttaatattatcactcaatttattatcttgagcacgcgttaaatcgtctttaaattgaacagttgctactttattatctttaccattgatttgaatttgatccgctttaagtccactatcttttacaacttgctcaaccttttgttgagtaattgcttgtttagattggaaatctacacgtgtaccacttgagaaatcaattcctaggtttaacttgaagatataaagaataactaaaccgacaactacaattaaaatacttactccaattaatggcttagctaatttaacaaaattccatttctcgaatgaagttttaaggtcatgaacatctacaccttcattaatatcatgtcgtttattctttttaacaccaaataaccaaaattgatttttgaatatatttgatgaaacaagtaatgataataagaatcttgataagaacacggctgtaacaaagatcattagaatacctaataataacattgtcgcgaaacctttaactgaactttcaccgaagaagaataatactgctgcggcgataactgttgttaagttagaatcaaaaattgttaagaacgaacttttgtttgctttagaaaaggcttgctttatcgttctacctattcgaagttcatccttaatacgctcatacatgataatattagcatctacagccatacctacacctaataccaacgccgctaatcctggtaatgttagaaccccggaaatgaaattaaatgctactaacgttagatagatataagttgtcaatgcaataatcgctactaaaccaggtaatcggtagaatccaagcatgaataaataaattaatgctacaccaataaacgatgcaaacacagttttatctaatgcatcttgaccaaattgggcacctactgagtttgaataaatttctttcaagtcaactggtaaagaacctgcatttaacaattcggcgatttgttttgcttttttaacgccttcttgtcctttaaatccaccagagatttctacactatcagaattgattggttgatcaacacttgctgcagaaataaatttagggtttttcttttgtgcttcttttttatagctgtcaccttttttgaaatctaaccaaacaaccatgacattatcacgtttcttagagatttcttccgttacttttttaaatttgtttttatcttttactttaaaagtaaccgtaggctggtttgtttcctgtttaaattcttgtttggcagatccctgtttaatatcagaaccgcttaattttactttatcttctgcatcgcgaattgttaaattagcttgagaagataaaattttacgtgcttcattctggtctgttacaccagcaagttgaactctaattctattaggttcttcaacttgaattttaggttcggaaacacctaaaacgttaacacgattttctaatgtttgcgctgttgattgtaaggcttttttatctattttgtcgcctttatttaaagggtcgacttgataaagtacctcaaatccaccttgcaaatcaagtcctaaattgacattctttataacacttttataagttgcagccattccggcaaacaacaatacgactaaaagcaagaacgcaattattctactacttttcttcacatgaacacctcattatttacgtatgtatttagaatacttgaatactattttataacgcaagttaaatctttcttacaaaatttattagccttatacatattaacatactagagcagggagtaaaaatagtcatagatatatttaatttaaatttaacaattattatgtatcacaatttctttttttggaataaaaataagtcattctacatactactaataacttaaaaaggatgaaacgctattcgtttcatcctttttaataccacttcttgttatgaagggtcaacttgtttaatagcaggtttttcgaaagttaattcagtaccatgaccattaactgtaataacaacagttgtttcatctactgctttaacagtacctttaataccaccaatagttgtaattctttgaccagattgaatgttattaatcaactcacgatgctgtttcgcacgtttttgttgtggtctgatcatcaagaaatacataaccgcaaaaattacgactatatatattagtaatgaaaattgcattttatacgctcctcttgcttaaaagttttttgggttctcaacatttaatccatattgctcgaagaattcttctttgaaatctaaaagacgatcttctcgaatggcttgtcttatatcttccattaattttagcagaaaatgtaaattatgaatagtagtaagacgaataccaaaagtttcctctgccttgattaaatgacgtatatacgctcttgagtagttttgacatgtataacagtcacaattctcatctaacggtcttaaatcatctgcaaattttgcatttttaataaccaaacgaccttgcgatgtcatacaagtaccatttctggcaatacgtgtcggtaagacacaatcaaacatatccatgccgcgaatactacattcgattaacgcatctggagatcctacacccattaaatatcttggtttatctttaggcataaactgctctgtatgttcaaccattttatacataaccggtttaggttcaccaactgacaaaccgccgattgcataaccaggaaaatctaattctactaaatcctttgcactttgttctcttaaatcttcatattcgccaccttgtataatgccgaacaatgcttgatcttcaggtctttggtgtgcatctagacatcttttcgcccaacgtgttgtacgttcaatagatttttttacataatcatattcagcaggcatcggtggacattcatcaaatgccatcataatatcagaacctaaatcattttgaatttgcattgatttctcaggactcaaaaataatttagacccattagtatgatgtctaaattccacgccttcttctgtaattttacgtaaattacttaaactaaacacttggaaaccgcctgaatctgttagaatcggaccatcccaattcatgaatttatgtaatcccccagcgtgtttgataatatcatttccgggttgtaaccacaaatgatatgtgttgcccaaaatgatttttgcttcaatttgtcttaactcttctggactcattgttttaacggttgctttagtaccaactggcataaacataggtgtttcaaatgaaccgtgtggtgtgtgcacgatacctaaacgcgcacctgattgtttacaagtcttaatgtgttcgtatgttactgcaggcatattcaaaatcctcacattctttttatataattaacattgcatcgccaaaactaaagaatctatattctaaatttactgccgttttataagcattcagaacattttcacgagtactaaacgctgatactagcataactaatgttgattttggtaaatgaaaattagtaatctggccatcaattgctttaaaatcaaatcctggataaataaatatattagtccagccactcgtttcaacaaatttatcatgatcgcgtcgaattgtttcaagtgtacgtgttgaagttgtaccaactgatataatgcgatatcctttggacttagtatcatttaataaatcagctgtttcttgtgtcatttgataatattcactatgcatttcgtggtcattcacgtcgtcgacgctcaccggtctaaacgtacctaatccaacatgtaatgtaacaaatgcgatattaacacctttatttttaatttcagttaataactcatcagtaaaatgtaatcctgctgttggtgctgccgctgaaccactttctttagcgtaaactgtttgataacgatctggatcatctaaacgttctttgatgtatggtggcagtggcatttcccctaattcatctaatctttcttgtaaaataccttcataatgtaaacgcatgatgcgtccaccttgatccatttcttttatgcattcagctataattttgccattaccaaaattcaatttattaccaactttaatacgcttagctggtttcagtaagacttcccaatcattaccttcaatttgggttaacattaacatttcaacttttgcaccagtttcttcttttaaaccaaaaagtctagctggcattactcgcgtatcgttaagcactaatgtatcaccaggtctaaaatactcaatgatatctttgaaatgtaaatgtttcatttcaccagtttctctatccatgactaataaacgactatgatcacgatcttttaaaggcgtttgagcaattaatgattctggtaagtcatagtcaaattcttcaatattcacgttattctctctcctcattcgactttgcaaaatgttcataagctaatggtgttgcttttctgccacgtggcgtacgttctaaaaagcctttctgaataagaaatggctcataaacgtcctcaattgtaatacgttcttcgccaattgttacggcaatcgtatctaaaccaacaggtccaccattatactgcttaataatacagttcatcattttatgatcaatgtaatctagtccgtgttgatcaacttgaagtaaacctaatgcgtgctttgttgtttcaatgtatatttgttcatcttcattcacttgctggaagtctcttacccgtttcaatagtcgatttgctactcttggagtccctctagaacgtttagcaagttcaatggcactttcttcatcaatacctgtgcctaaaacctcagctgttctaataatgatttcttttaaatctgattcattataatattctaatcttaagtgcacaccaaatcgatcccttagtggacctgttaagctaccagctcgcgttgttgcacctaccaaagtgaatggaggtaagtcgattcggatacttctagcctcatcgcctttaccaatgataatatctaaaaagaaatcttccattgcagggtataacacttcttcaacaacactactcagtctgtgtatttcatcaataaacaaaacatctccaggttgaagccctgataaaattgcagccaaatcaccaggtctttctaatgaaggccctgatactgtacgtatattaacttccatttcattggcaatgatattagataatgttgtcttacctaatccaggggggccaaaaagcaatacatgatctaatggttcatgacgaagtttagccgctttaataaatacttctaaattactttttattgaattttgaccaatatattgtcgtaatctcgtaggtctaagcgacaattcaaaatcagtttcttcactatgcattgattgatcaaccatacgctcattcatgacaacacttcccctattaatctatttaaaattaagatacaactaattgaagacctgccttaacagcttcatcaactgagtcatatttatttttatttaacgttttctcaacttttgcaagctctcgtttagaataacctaatgcttctaacgctaacattgcttcttgcacgaattgatcttgtaccgtcgatgtagcgtctacttgtaataatgaatcgctatcttcttcagtgattttcactttaccttttaaatctaagacaatctgtcttgccgttttcttaccaattcctgggaatttagttaaatacgtatcattttcattttcaatggcacgttttacttcattaggcgtacttgtcgctaaaatagctaaagctgatttcggaccaataccagtaactttaattaaactcaagaacatatctttctcttcttcactactaaatccatacaataattgtgcatcttcacgaacaattaaagatgtatgaattaaaacttcatgatctagatgcttttgaaaacgataagaatttggtgtttgaatttcataaccaacaccagcagtttcaacaactacgtgtgtaggatataaatgtgttaacttacctttgacatacgcgtacattataggcacatccttacatactcatactaattaattctacttttgatacataatctaaatttctcaaagcgccaataacatcttctactgaagtttctttagatttagcattcagtgataatgttattgttgctttttcttccattggaatactttgatgaatcgttaatacagatagttctaactttgatataacatctagtacacgtgccaacatacccacaatatcagttacatataaaattaatgtaaattctcgatggtcaagcattttatcgtctactggaaatatcgtttctctatatttataaaaagcacttctagatagatcaaactgtttaacggcatcataaatggacaatgtcggatcactttttaaggcatctttaatcttcaatgttttaaccacggattcaggcaagacatcttctctaattaaataaaactttttataatctttattgtccatcatgttacgctcctattcaacgaattcaaattctccgccaagaattctaacgatatcaccatttttacaaccacgttctctaagcgcatcatcaatacccatcgaacgcatttgacgagcaaatcgacgtactgctggatcactgttaaagtcagtcattttaaacattctttcaatagcattaccgcttaccacataagcaccatcatcatctcttgaaattgtaaatttatcttgtgacggtgtatgtttatataatactcggttaatgccaaccgactcctcttcttcaactgtgaagtcaacatctttatattcttctaatttatctgctattgcatataataattgatcaatattatcacgcgttattgttgaaactggaataactggcacatcttcgccaatctcttctttaaataagattaaattatcttgtgattcaggtaaatccatcttgttagctactacgatttgaggtctatcttctaaacgttgctcgtacgcggctaattcttgattaatgactttataatcttcaataggttctctaccttcagaaccactcatatcaatcatgtgaacaataacttttgttctctctacatgtcttaaaaattgatgtcctaatccaacgccatcagatgcaccttcaattaaacctggtaaatctgccataacaaaacttcgttgatcaggtgttgaaacaacacctagatttggtttaatcgttgtaaaatgatatgccccaattttaggcttagcttttgaaacgatagataataaagtcgatttacccacactagggaagcctactaatcctacatcagctaataatttcaattctaaagatacatctaattcctcacctggttcacctttttcactgaagtcaggtgcagggtttctaggcgttgcaaaacgtgaattacctcggccacctcgaccgcccttcgctactacagctctttgaccatcttcaacaagatctgctaacacttcatctgtttcaacatttttaataattgtgccaggtggaacttttaatactaaatcttccgcatttttaccatgcatattactactttggccattttcacctttgcttgctttaaaatgacgttgatacctaaaatctaataacgttcttaaaccttcatccacttcaaatacgactgaagcacctttaccaccgtcaccgccagctggtccaccaaatggtacatatttttctcttctgtatgcggtaataccattaccaccatcaccggctttaagagatattttgacttgatcgacaaacatatatctcacctcttttacatataattttcattttcccaataattatagcatattagagccccttatatattgtaaataattaggggctcttatgcagttgcttttaagtttactttactcaaattgcttatatttctcagaaccaatagtggtacagttttattctttaaacgctgcaactgtaatccttttagccccttatagtttagcgattaggggctcttatgcagttgcttttaagtttactttactcaaattgctgatatttccaagtaccaaatatgatacttttttgctttttatactgcaactgtattcctttgtccccttatagtttagcgattaggagctcttatgcagttgcacatttagtataacgtctaaaattcccattttttaataacaaaatgaaaataataatgaaaaacgttttataaaaagtaaaaaacaccagaagattcacttctggtgttaactagacaaaattattcagctactgcatatacagaaacttgttttttgtcgcgacctttacgttcgaatttaacaacgccgtcgattttagcgaataatgtatcatcgccaccacgacctacattttcaccagggtaaattttagtaccacgttggcgatataaaattgaaccacctgttacgaattgaccgtcagcacgtttagcacctaagcgttttgattcagagtcacgtccgttttttgtagaacttaccccttttttagatgcgaagaattgtaagtttaattttaacatcggaatgcacctcacttataatttaatctaatattctcattatattcttcttcaatagtttgtaaagacacaagcattgtttgaagaattagttgcgcttcatcgttatttgtatcaacgcttcttatatgaaaatgaccaccattgtcgtcataattgatatctggtctctcagatgtcaatcctataatcgcattaacactaccaaacaatacagctgaagctccagcacaaacgatatcatgaccatattcaccatggtcggcatggccatccataataacgtctgttactttgccttcatcattaactgtaatatcaacagtaatcataataattacgcgttgattttatcgattgttaatttagtgtatggttgacgatggccttttttacgttttgaatttttacgacgtttgtatgtgaatacagtgattttttttaccgcgaccttgtttattaacagtagcagtaactgttgcaccttcaactgttggcgctccaactttaactgaatctccacctacaaataatactttatcaaatgtaaaagtatctccttcgtttacgtctaatttttcaacgaagatttcttgaccttcttctactttgatttgttttccacctgtttcaataatagcaaacatactttgcacctcctgtataataagtcacgccatacataggtgacatttcgttattgagtcaagcgtttgcactctacgttgtttcggtcgcaactcgagtcatttataaagataaactcttctcgtttcttccttcaacgccttgattgacaatcgctttcttcattaaaaatgttcttgaacctatatttgagcggttgtatgtagctacttataactactcaactattgcatcttaccattgacggcgtttcatgtcaatgtcattgtttgtttttttaaggaactttataatcaacggataaagcatgattaacagtacaaaattcataattaatgttggcaataatctaaagactacaaaatgaataatatcaaattgaatgaatcctaacataccgtatattaatgccacatagccttctaataataaggtgctggctaatataataatgaataacatcgaatgatctttgtaaaaaattttaaagaatcgatctataagtgctaaaaacaatatatagccaaataagtacactccataaatactaccaaagtatacatcagtcattacgcctaaaaatatgctgagcaataatgatacgccaaagccgcgatacactaccatcattaaaatatacataaatgtaaggtgtggtacaaatacaagttcaaacttacctatgtgcattggaataagaagcccaattgcagtatctatataaaatagtaaaatacctatcaaaaaataatacagtgtacgcattatttatccctgctttcatcatcaggaattgttttaggatctctttttgcaacataaacatggctcaaatctgttaagtctgcaccagtcttaaccctaacttctttagctaagccgtattgatcattttgaaccttagtcacttctcctatatataaattacttggtaattgatcagctaatccacttgtaacgactttatcaccttttgagatattatctctattattaatatcactaataacaagttctgagttcttttcatcataacgatcaattaagccaaatatgtttttagaaccgtgttgtatatttacagataatttacccgcacgtgtattagttgagattaaatcaacttgtgaagaaaatttattaactttagtaactcttccaacaaaaccttgtgatgtcatcacagccatatttgaagttatacctgatttagatcccttatcaattacaattgtattcatccactgatccggatttcttgctaaaaccgtagtagaaataggatcaaattttgaaatatcttttaaatcaagctctttttttaatttttcattttccgcttctaattgttggttcttagattctaactggctaatcttatttttagattctttagaatctccttttttaaaaaagtccccaatcgtaccagcaacaaaattaactggataactcacaactcgttgtccaaaagacacagaatcacctatatattgttcaggaggtgattgagattgtgaacgtatggacagcccaattaatgcaataaaaacgataattgcacataaaacaacaattaatttgttatttttaaaaaacttaagcacccagaacacctctattatgtcaaaatattgtatatccttttctattttatattactcccattatgaaataaagcactaactacgaattactttgaaaatgaacaactccgtaaaatatttgtggcattttaaaaacaaaaaactactagcaaacattccagtcactagtagtttaaataatcgatttaaattttaaaattatctgtttgtatcgttcgaggattcactgttcgaattctgaagttgtctccaacgtgcgaataagtactgggccttttgttgttcattagcttgtttctgttttgattgttctgccatttgaactacaccaaccttttaaatttattctagtgacaggataactaaaatatatttcttatgcaataatttcctattgataagcattttcaggttttagttgtaaattttgccctaattcatttaagtcttgttgcatttcaaattcagtattgtaaacacgcattgactcatctccaaatttataaagaataaattcgtctcctctttgacctataatatattgatcattataagccatgcgattcattccagacacagccataaactcttgtttatctatcattttaaatacatttttaatttggcttaatggtacattctttattaaatcattttcttttaatgaatatttctcaccacttacataaacatgttgggcatcattagtgggttgcgtaacttgattcgtttgatcattatcgtgatttacaggattccaatcttgttcttttaaaaaaggtgcgtatttcaaggcgatataaacaattatcacaattgctattactgctataatgtttttaatcatactaaatatcaatctcatagttcgcctccaatgtcttcatctaattatatattttattatgtatattttcctcagtcttcagccttaatcatgatatatcttaggactgatgcacgttcatttaaaatagcttataattttgttatgatttaaaagcgtatgaggaggtttgtagcattgagtatactaacaattattttaatagcactattagtcatcctcctttttagagttggactttctattttgcgatttttaatttatgtcggacttgttttattatgtatttacttaggatatcaaggtttaatatggttgctcgatttttttcaaataaatagtgggtttttaccacactttcaatttaacaattaaatttattctgcataacaaaactcctaatgtactagtttagaattttttaactagttccacattaggagttttaatttgttttcaaacacggatactacttgatgaacagattactattacttacgcccaaatgcgttagataaaaatcgtatcagcgcgtagctaccacttagtaaaaggccccaaacgattccagtaaaaattgagcctattgctacacttaataaaggaaaagcttgtttcgtaacaatcacacctgctaacgccgttactaaaatacctaccgtagataaagctaatgttattaatagattgcgctttgttacaggttcatttttaatatttaactgcatggtataaaccattggcacgagaaccccgataataataaatagagtcactatttttcctccaatgaaagtacttcgtaggtattatacacaagatacgtcattaattctatcaacttcaatcattttcatcaaagtaacccgcttctacaagactcgtaaatctattatcaccgattataatatgatccaataaatctatccctaaaatcaaaccacactccttcaacctcattgttgttatgatatcttcttgtgagggcgttacatcttatcaagagtaaattatgaaaaaaatggtttaaatcaatgttcttactttaagtacatgtgtttaacgtaaatgataattagttaaatataaaaaggttatcccaatcaataggataacctctttatactttactttatagtttggattcgccacttcaaagaagaaatgaaatcagagcattgaatgttccattttcaaacaatatataaatacctagcccaatgaatacaattggtacaatccaacgttcatatttctcaattgtttccgatataaaatcgaaggaagctagacggtaactgacatagcacaaaactccaaccataattagaaagacaatagtgacaataaagatttcagacatacttaaggtcgtgaagtacggtatataaatggaaaagtcatccgcactggaagccaatacgatgaaaatcatcgtcaaaaataactgttaaattttccagaggagaataaagataaaatgctactttcatcttcatcctcttctcctttaatccatattttcacgcctaggtaaagtggtaaaagtccaagtagtccgataacccattgctgaggaattaaatttacaaccccctgtgcaactaaaagacttgctcctatcacaattgcagtccctatatattgtcctatccaaatatgttttacctgacctttttttacttgcgaaaacaaaagaattaatatgacgagataatcaattcctgttgctacatataccgcagtagccgtcagtatcgtcgcgatcattttatcatctccaaatattttagggataggacttttcttcaaaatgaaaagtccttccgtaaattgcacacatatagtacctatttatccttcactctcatcagtcgcaaactatttaatgctaccaaaatagtggctcccatatcggaaagaatcgcaatccaaagggttagccagcctggaataaccaatagtaaggcaattatcttaattccgatggcaaacgtgatgttcgctttgatgatatttagcgttttcctgctaagtcttactgcaaatggaagtttacttaaatcatctcccattaatgcaatatcagctgtctcgatggcagtatctgttccagcaccgcccattgcaatgccaacagtggatgcagcaagtgcaggagcatcattgacgccatcgccaatcatagctacattaccatgctcggctttcatttttttaatatagtccaacttatcctgtggcatcaattcggactgaatatcagaaacgcctacatgagcaccgattgcttctgcggtaccttgattatcacctgtcagcaaaattgtttgcttgattcctaactgatgaagtttttgaatcacatttttacttgtttcgcggacctcatctgctacagcaatcacgccgaggattgtttggtccgttccaataatcatggccgttttcccttggttttgtaaaactttcactttattttcaaactcaaggctaaaatcggaaacatttaattctttaaaaagccttggactgccaatgtaataggttgttccatctatattcccttgaatgccccgacctgtaatagaagtgaagtcctccactctaacatcggaataagtaatattatcttgctctgctttcttcattattgctgaagcaagtggatgttgtgatcgatattctaaagctgtaataatggaaaacagctctttttcttccacttgatcatttaacactttaaaatctgttaccactggtacaccttttgtcagtgttcctgttttatcaaatgcgattgccttaatggctcctaattcctctagatagacaccgcctttaatcaacacaccttttttagctgcatttccaattgccgagacaatcgagattggagtagaaataactaatgcacacggacatccaactacaagtaccgctaatccttgataaacccaagtatcccaacttccaccaaagaataaaggtggaacgactgcaacgagcgccgcaataaccataatgatcggcgtataatatttcgcaaatttatctacgaatgcttgcgctggagcgcgctccccttgtgcttcctcaatcagatgaataatcttggagatagttgtatcctctacgtatttggtgatttttacttcaagtagtccctcttcgttaagcgtacctgcaaatacttcatcatctaccgttttggcaacagggacagattctcctgttatagcagcctggttgacagccgacacaccatttataatgatcccatccatggcaattttctcccctggtttgacgatcataatatcacccacggcaatatcgtccacatggatcattatttcctgaccattccgcataacaagtgcttcttttggggcaatatccatcaatgaacgaatggactgtcttgctctatccatagaaaaacgttcaagtgcttcactgattgcaaagagaacaacaacaatggatgcctctgcccattcaccaatgatggcagctccaataactgctacggtcatcagggttttcatgtcgaaatcaaagcgtatcaaattttgaaaaccaactttaaatagtgaatatccgccaattacaatcgaacctacaaataacatggaagttacaaggttatcttctccatttacaaagtgagaaaggtaaccaaaagcaatcagtaatgtggcaaacagcaatgtgctgtgttttttataaaacggtattttctcttctttaggagccttagtgtcttctttgaccgcttgcatcgatgaattcgctagtttttcgggaaataccttaagattctcgaaagcacctgctttttcaagctcttgaaccgatgcatttccatatacatcaattttggaagcgccaaagttcacttttgcatcctgaactccagctagttgttttacatttttttcaaacttcccagcacagtttgcgcaggaaaatccctccacacggtaaacatttttatcttctgttaccactggttcgacccgtcttctagccttctctggtgccactttaagattctcgaaagcaccagccttttccagatcttcaacggttgcactgccaaaaacatcaattttggaagctccgaaattgactttagcatcatacacccctggtagttctttcacatttttttcaaacttcccagcacaattcgcacacgagaaaccctccacacggtaaacctgtttatcttctgttaatgtttttgctgaactatccaatactagcaacctccctttgatgcaagaaagctttttctacaagctgtttaacatgctcatcatctagtgaataatagactaattttccttctttacggtattttgctatacctaaatttttcaataatcttaaatgatgggatgccgtagccgttgaagattcaatgatattagctacatcacaaacacataactctccctctaaagacaaaacataagcaattttaactcttgtatcatctgatagagccttaaaaactttcgctacatccataggattctgtttagaaaggtcttttttagccctgtttaccttatcttcatgaatataggtaacttcacacatatcttttgtcataattatcctccttattcaaatgactgtttgtttgatgattataatatatcccaccataaacaaatagtcaaatgattgtttgaatgatatataattaatattaaaaaggattgatttctaatgttagaaaccaatcctttcggagattttaaccaaattttaaagtatcttaaacataactgccccgttagtttaagtgcatcctttcacaatctgtctacagattaataattaaaactactctttattatacagatctccatataatttttgaatttggttctgtaattttttattttctttttctaattccataactcttctttttaaggtttttataaggatttcctccgaacgagaacttttcttgggttttgagactacatttgatgttatttgacgctcacgaagggattcgattctttgcctaatatcgtgttccttataaagccatgatttagaaacattagcttcctttgctattgaattaaaattaatagctttaccttcaatcgaaaatttagaaatcgctttgtctactttttcccttgtcttttgtgatttctgcttcgccaaacgtacaatttctgttgtatttctaacttgtttatccattgataattaccccgtcaaacttccaatgatttgttctaaacgctctttaacacggctattagtctctatttgtctttgccattgtttatcctttgctatggttaataactcttctgtacgctctaactgttcttcgtgctgtggtaagaattgcttactggtacagaagtgagtgcaatctaagcatgcattcgcatgtggacaaccacctgctattactggcaatctacaataaccatttggaagcacttgtgcatttatatttttcttgaaccattgaagctctacatcatcgacttcactatcatcatctagattgagcacatctccattattggtaaccagtttttcttgaaatttagtaaattcattttttagagtttcatcaaagatatgagcgtatctgcttgtcatttctgggctttcatgtcccaaaaatttctgcacaatatgctggggtaccccgttgttaatcattcttgttcctactgtatggcgaaaggcatgggcatggaatctataaatctcacctaatttatccactatattttgctcataagctaatttgtttaattcgcctctaaatgtttcttgttttaatggcgatccatcttttcttggaaagaggtattcactatatggaaattcctctgaaactttatcttcccgaactttaataagtaaaactagctctttagatattggaactatatgctcctttttcattttccattgataatactttaaaaagtaatctccatctttgtcctctaataaacagccttttttcaaggtgcacaattcacttatcctcattccacattcttgaacaatcatagtcatcgtagctatatattcgggtaatttatcaagatgactgttcaattgctctagaacgaattcgtctataaagcgaggttttgctcttggtattttcggatagtcctcgggataaattaataatttggaaggaacatcatcccattctagcctatgaagggtactaaatagtccttccaatatagagatcctcccagttattgtactaggttttatccccatcatgtttagttcacttaaatatgcttcaatttccactctcgttaattggtgtactctctgaacgtgtttaaactttatgtccagaaaattaaagaactctttaagtttttgggcaatatcacttacataggaaaagctatccatgttcaatcttaacttacaatatctttttacaagctgtttataatatgtattccgaaaccctttaaagttaattgtatattcatattgtgttgggttaaccttatcatctggcaaaggtaagtttcgtctatcccaaacgtctttatcccactcctctccatcaaaataaaaatcctcataaaactcaataaattgttttagattagtaacatagtaagaattagcttttacaggtgttttttcttgattagcagtaatcttataattagtggtggtaattctaacaccctgttttgtcaaatatgttctatactccgtcattgctttatcaataggaacttcagtaattgaagtaatgctgggatactttaaatctaaaaaatccaacattttatttattactgttccttttctaatccagacagtttttgcattccatattccattgtttaaatggtaaaaataaaaatatttcaattctgttcttaaccacagatttttaacacgttcaaaacgaacccaacgatttcttaaagcaggattcttacttaattctatggcagaaggatgtggacattttcttatatcccaactattattagcccaaaacccttgcatttcttcattcattacagctatttttttgctgatctcactctgactgataattttccttttactagaagcattcatttcttatgctcctttctctcaaggtattttttaaactcatttttcatatcctgatctgaaagatgaacataggtatttaacgttgtctgaacatgtgcgtgacctaatctcttttgaacgaacgcaacatcccatccttccctaattagctgcgttgcgtgagtgtggcgaagcatatgcgatgtaaattctattccagtccttttaactattcttctaactagatcaagaacactttggtactttagtggtttcccaaaatagcctacttttaaggaaataaaaacatagtcatgctccaattcctcactatactcatatatcaagtaatctgtataaagtgacatcagttctttactcacatgtattgttctttccttccttaatttaatataagcttcattaacattaacatttctgggtgttaaatggattttattgtcccaagtggcgatatcttcaagcctaagcgataacacttcaccgattcttaaaccaccttcatacataagcattaaaattaacttatctcttttcgtatgacaagcgtcaataatttgcttaacttcctctgctgtcaatgttctaatctgtttctttttaacccttaactttaagacattcttttggtacctacccttattaacatgatgtaaaaatcctttgaagtttcttccctttgcttgtttaaatacatcaattgatttaaattctcctaatctacttaaataatcaagaaaactcataacggcatttaaaattgtattcactgtcgtttcttctcttatggcttcttttgactgaagatcaattacattatttgctgttggatatctcaaccaacctacgaagtctgctaacaactcaaagttaatatcattaagaataacgcctctctgttccatgaactcatacagcaactttaaatgatagcagtatgctttaatggtatttggagacttaccagtgttatctaagtatttaataaatttcattactggttcaattagctggtattctttatctagtaataaatacaatggatacggcttattctccatttctatcctttgaaccctcacacgcgccccccctctttaaacactttaagtactacaaattataaaccttgttaatttttatttaaagtaaaatctccctttaacatctcctcctgaactactttaactactattatttattatactatggttaatacatcaccggatggatgattatgaactgcgatgattgcattggcattttctctcaccgcaatactaaaaatttcgcgtggatgtacaatcgaactatttaatgtacctttaaaaacacagctttctttaatcactacattttttgaatttaacaataaaatgacaaaatgttcttgtgttaaatctttcattgttggaatcatataatcagcaacatcacttggttgcgttatttttatacgattattttcagctcttctccccatcctttcccctaactcaaatgctgcttttaatgtaattgctttttgtaatccaatccctttaacttgtatcaaatcgttaattgaagattttttcaattcattcagattcgaagcagatttaagcagttcattactaatgtctatactcgagaatccttttcttccggtgttaattaatatagctaataattctgtattcgaaagactttttgcaccatggcttaacaaacgttctcttggcatttctgaagttaccatttctttaattttcaaaaatatacgcctcctaaaaattgatggatatcattataaaaaagtgaattgataaaaaaggaaataaatataaatggaacaaggggtaatagttttatcggcttaaatatcatggtaattaaagcaactaaaccagcaatgacaaatgtaaataaaatgacataaatagtgaattggagagggaaaaacaaagaaagtgcagatattagtaaaacgtcaccataaccaatatatgcccgaaataaaaagtagaatatatgcgtggtcatactaataatgataaaagctactggataaataatacttaacgagagagaaacaatacaataaattataattaagcgacaatctaacattaaagacgtaatatcggtcatagtaaaaataagcagaaaaacatatgtagttataaatagcgtagcatttacgtatgtgaaatcatacttaataaagacgatagggattaaagcaaaggtttcccctaagaaatgtgttagggaaatacgcttacgacagtttcgacatcgcccttttaataataaaaaactaataatcggcattaattcataccatttgagtgatgaattacaataatcacatttcgatcttctatgtaaataatcaaatgacgtttcttctatagatataaattgatatagaaaactaaagatacaactgcaactataagataacaatactaccaaatgacaacctccttacgtaaagtatagttagtcattaccaaaatgtaaatatacactattttccaagaattgcccctctttttcatttaaatttttcaatattgctaagcataattgatggatactttaataacccatttctgctcgtcaaaattaataatggcaagaaattgaaccttataaacacatacgatttagagcataaaaaataaccatgaagctacctattaattaaatagattcttcacggctattttagttttagttttataatgcttcgaagtctaattttgatttaacttcacttatgaagtacagactaccggtaattactaatgtatcaccttgataattttttataaattcaacgtagtcatctactaattgtatttcatcattttcaatactacctacaatttcttctttgagtaacgctttcggaaaatcaaattcagttgcataaaacgtatgcgcaattaaacttaaatgtttgaccatctcgttaatcggttttccgtttattgctgagaacaaaatatctactttttctttatcatggtactgtttaattgtatcaattagagcatctatactctctgaattatgtgcgccatccaaaatgattaaaggtttgtcatgcacctgctcaatacgtccagtccaacgaactgattcaataccgtctatcatcttattgaaatctaattcaattaatccttgttcatttaattcaataagagctgttatggctaatgcagcattttgtttctgatgttcacctaacatacttaaaatgattgtttctaattcataatctttataacggtaagtaaattcatcattttgcgatacaacaacaatttctctatctaattcaattggctttgcatgttgttcaattgcgcgttcacgaacatactttaatgcatcttcatttttaacagcatatatcactggaacgttaggctttataatcgcgcctttatccctagcaatatctagataagtaccacctaaaatatctgtatggtctagaccgatactagttaagattgataaaatcggtgtaaagacatttgtcgaatcgttctttatacccaatccagcctcaacaatgacaaaatcaacaggatgtatttcaccaaaatataaaaacatcatcgctgtgattatttcgaattcagttgcaacacctaaatctgtttcacgttccatcatttcactaactggtttaatacgtgatactaattctacaatagcgtcatttgatattggcacaccatttagactaattcgttcattaaatgtttcaataaacggcgacgtaaatgtacctacttcataaccattttcaactaaagctgttctaaggtaagcaactgtagagcctttaccatttgtgccacctacatgaatacccttaatgttattttgaggattattaaattgtgctagcatccattccatacgtttaacacctggtttgatgccaaatttagttctttcgtgtatccaatacaagctctctaggtaattcattgttactaactcctatgcttttaattgttcaattcttgccttcacaccatcatatttttcttgataatcttgtttttacgtttttcttcatttataaccttttcaggcgctttacttacaaagttttcattagagagctttttatctactctatctaattcgctttgaagtttagctaattctttttccaaacggctgatttccttatccatatcaattagcccttctaatggtaataccactttacctgcaattacaactgatgtcattgctttctcaggaatttccacgtcagtgctaatatttaacgtactaggattacagaatttgattaaataatctttgttttgtgataaagttgtttcgatttctttatctttagcttgaattaaaataggtatttctttagacaatggcgtatttacttctacacgtgattgtcttacagatttaatgatttcaacaagttgttgcattgtttgtttactttcttcaaaaatcaatgattcacgcacttctggccatgaagctttaacaattgtgtcaccttcatgtggtaaactttgccatattttctctgttacaaatggcatgaatggatgtagcattctcataatattgtctaaagtataactcaatactgaacgtgtaatttgtttttgttcttcatcattaccattcattggaattttactcatttcaatgtaccaatcacagaaatcatcccaaatgaaattatataatgcacgtccaacttcgccgaattcatatttgtcacttagatcagtaactgttgcaatcgtttcatttaaacgtgttagaatccatttatctgctaatgataagttaccacttaaatcgatatcttcaactttaaagtcttcaccgatattcattaaactgaaacgtgccccattccagattttattgataaagttccatactgactcaactttttcagttgagtatcttaaatcatgtcctggagatgaacccgttgctaagaagtaacgcaagctatcagcaccgtattcgtcaataacatccattggatccacaccattacctaatgatttactcatcttacgcccgtcttcagcacgaactaagccgtgtaataacacatcattaaatggacgacgatctgtaaattctaagccttggaatatcatgcgtgctacccagaaaaagataatatcgtaacctgtaactaaggcatttgttgggtagtatcgtttaaagtcttcactttctaaatcaggccaacctaacgtagagaaaggccataaagcacttgagaaccacgtatctaatacatcttcatcttgttgccaattttcaatatcagttggcgcttcttctccaacatatatttcgcctgtttctttatgataccaagctggaatttgatgaccccaccataattgtcttgaaatcgtccaatctctaatattttccatccattggttaaatgtatgttcgaaacgttgcggataaaaatcaatacgatcatctgttttttggttatctaatgaacgtttcgctaagtcttccatgcgcacaaaccattgcgttgataaatatggttcaacaacagcgccagatcgttctgaatgacctacagaatgaacatgatcttcaatcttgataactaaatcttgttcttttaaatcttcaactagctgtttacgacaatcaaaacggtccataccttcgtatttaccagctttgtcgttcattttaccattttcatccataacgataatattttctaattgatgtctttgaccaatttcaaaatcattagggtcatgtgctggtgtcactttcatagcaccagaaccgaagtctatatcaacatactcatctgctaaaataggcagttcgcgtcctacgattggtaatataacagttttaccgattacatctttgtatcgttcgtcattagggttaacaacaatcgctgtatcacctaacatcgtttctggtcttgttgttgcaatttcaataaaaccttcaccatcagcgtaaggatatttaaaatgataaaacgcaccttgaacatcttcatgtattacttcaatatcagataaagctgtacgtgctttaggatcccaatttataatacgttcgccacgataaataattcctttattgtacagatcaacaaaaacttttttaactgctttacttaaaccttcatctaaagtaaaacgttctctactataatctaaacctagacctaatttagcccattgcgcacgaataaatgacgcatactcttctttccaatcccatgcctgttctaaaaacttttcacgaccaagatcatatctagttattccttgttcatttaatttagcttctacctttgcctgtgttgcaataccagcatgatccatacctggtaagtataacgtatcgtatccttgcatacgtttcatacgtgtaatgatatcttgtaaagttgtatcccatgcatgtcctaaatgtaatttaccagttacatttggtggcgggataacaattgtatatgtttcttttgatttatcttctgacggtttaaaataaccattctttacccattcttcataacgtcccgcttcaacttcacgaggatcatattttggtttcatttccatttgctatacctcctaaaaaaaataaaaaatatccatcctatatacaaataggacggatattccgtggtaccacctatattcaagaaggatgattaatatcaaattcactcttttaacataattggaataatcataccaatactatcatcgtgaaatttgaaatgcttcatctcttcaagcactctagattatgattaacgctcaaacacgtcttagcctactattaatcacgttcagctaagatactctgtgggctaccttcagtaaaaatcatttacatactcacaccaaatcatatgctctctttaaaataatttgaacttactcttcccaaatcctatattaaactcttaacttatagtataatgattgacaaaataagtcaatgtataggtgggaataaaatgaatgaatgcgcatttggaactaaagatccagtctatttagactatcatgatcatgtatggggacaaccgctctatgatagcaaggcattgtttaaacttttagcattagaatcacaacatgctgggctatcttggttaactattttaaaaaagaaagaagcctatgaagaagcattttatgatttcgaaccagaaaaggtagcacaaatgaccgctcatgatatcgaccgcttaatgacttttccaaatatcgttcatcatcgtaaaaaattagaagcaattgttaatcaagctcaagggtatttaaaaattgaacaagcttatggtagttttagtaaatttttatggtcttatgtaaatggtaagcctaaagatttacagtatgaacatgcttctgatcgtatcacagttgatgatactgcaacacaactatctaaagatttaaaacaatacgggtttaaatttttaggtccagtaacagtattttcgtttttagaagcagctggtttatatgatgcacatttaaaagattgtccatcaaagcctaaacacaattaatttgctatagcatcataaagtaaacgagacatcatctatttttaactaatagactgtctcgttttttaatgtagaaatttattcaaatcacaagttaatgttccatgttaatgcactgctaatattagatatcttaatctaaaaatagatgtacaacctttgcttaaaccttaataatgaattctatcctaagcataatttaacttaaatggatgatagtttctaatcttcacgcttattcgaacgatattttaaaaagtaattaattcctggtgctataataaataggatgaaaaagattcgaaaaatatgataactcgtaatcatagcaacatcggcaccagtagctaatgcaactaaaactatctgattaacccctcctggtgctgcaccaagaaacaattcatttataggattattatcaaagaaatgtatgacataaaccatgattagcgcaccaattatcaacataatattttgaattgtaattgcgattgctagtctaccttttaaatctgacaataaatgcgcaatttgaactccaattctaatcatatatattagttgtgccatgttcaacaaccaatgatctagtgtaaatgttaaacctgtagaaaaattccaaacaattaatacaatgagtggtgctaataattgaaatgttggaaactttattttagacataattagataaactataaagatagctatcgctaaaataactatttgccctatgtttaatacttgtgataaaggcaagacttttgttaacttaccattcgcatgcatgttaccatcatgaaaaaaatatgaaatgaacggtactaaaacaacaacaaatataattcgtgatgtttgcgttaagctaactactaacaaattagcacgtttgtcttgttcagccatgaccagcatttgtgttagtgctcctggtataacacttaaaatagctgtttctgtattaatacgtgcaatttttttgaaaataaatgccattactaatgcaattaataatatcgaaatagatacaacaataatcgaaagccaattgtctttaatatccataacgacatttttcgtaaacgttgatccgatttgcacccctaatagtacaatccctaattcactaagtaagaatggccatttaatatcaagtttgaaaactttcacacaaatgattgatgcgataataggaccaaacataaatgggagtaatacgtgcgatgaatacaatataatactaataaaaaatgataaaacgaacacaatgaaattatttctatatatcattgtcatgttttccacttctttcaataaaaaataaaatgactaaattgctgcttgagcttcacgtttgttaagataacaatatccgctagcagttttgactacaaagcatatatggactttcactatcaagtcgctgcccatgcctgatatacatttaaaaagagcctgaacaaagttcaggctctcaatttgtccgtatatttattttacaatacgacttaaagccgtatcaaatgcttgaatcgttttttcaatatcttctttcgtgtgtgccgtagataagaatgtaccttcaaattgagatggtggtaaaaatacaccttcttttgccatttcacgatacatttctgcaaataatttcaaatcacttttattcgcttgttcaaaattagttacaggtccttcatttaaaaaataaccaatcattgaacctgctctatttacagttattggtacattgtgtttagcaaatacacgctttaaaccgtcttcaagtatatctcctaacatattaaaatactcatatgtctctggcgttaattgacttaacgtttcataaccacttgtcattgcaagaggatttcctgataacgtacccgcttgataaatatttcctaatggtgctatatgatccatgatttcttttttaccaccaaaagcacctacaggtagtcctccaccgataacttttcctaagcaagttaaatctggtgtcacaccaaagtgaccttgtgcacaatgataaccaactctgaaaccagtcattacttcatcgaaaattagcaatgcgccgtattcagtcgtaatatctcttaatccctgtaaaaaaccttcaatcggcggtacgacacccatattaccagcaacaggttctacgattacaccagcaatatcgtctccaaatttttcgaatgcgattttaagagcatctaaatcattgtatggaaccgtaattgtatttttagcaataccttcaggcacaccaggagaatccggcaatcctaatgttgccaccccagacccagctttgattaataacgaatcactatgaccatgatagcaaccttcaaatttcacaattttatttctgccagtataaccacgtgctaatcttaaagtatccaatgtagcttctgtaccagatgacaccatacgcactttttctattgaaggtactcggtcaataacgagctgcgccaatttattttcaagtaatgttgatgcaccaaaacttgtacctttatcaattgcttcatgtaaatgactgataacttgagggtctctatgtcctaaaataagcggcccccaacttagtacatagtcgatatactcgttaccatcgatatcataaatttttgagcctttaccgtggtccataaaaattgctggtgtatctactgatttaaatgcgcgtactggactatttacaccaccaggcattaaagtttcagcaaccttcattgcttcttctgacttcgtatatctcataaagtaaattcctcctatagtttatggaaaatcatacatataaaaccttatttatctaaatagcgacaaatgtcctttgcaaaatacgtaataatcatatcagcacctgcacgtttcattgaaaccatttgttccataacgacacgttcttcatctatccaaccattttgtgccgctgctttagtcatactatattctccactcacattatatgcaacaactggaacattcgtatgatttttaacatctcgaactatgtctaaataacttagagcaggtttaacaatcatcatgtcgcacccttctttaagatcactttctaattcacgaagtgcttccaaacggttagcagggtccatctgatacgtttttctatcaccaaatgatggcgctgaatctgctgcatctctaaaaggtccaaagaaactagatgcatacttgacaccataactcattataggaatattgtaatagccggcttcatcaagtccacgacgaatttcagcaacaaaaccatccatcatattacttggtgcaataatatcagctccagcttccacttgagaaattgctgttttaacaagtagtggcaatgatttatcattgtcaacgtcatgtgtatggtcatcaatcacaccacaatgaccatgatcagtatattcacacaaacaagtgtctgcaacaattaataagtcatcatacatttttttagcaatacgtgtcgcctgttgaataacaccatcgtgaatgtatgcaccagtacctatatcatcttttgagtttggaacaccgaaaaacataatggcacgtatgcctaagtcataagcttcttttaattcactttcaagtaaattcaaactgatttggtatacacctggcaatgacttaatttcttttttcacatcgtctttttcaactacaaaaattggatatattaaatcttcttttcttacatgattctctctaaccatatctctcattgtcgctgatgatctcaatcttctatgtctatcaaatttcatttttagcccctactttctaaaatcttttcaattagtgattcaagtgtttgaatttctgcaattgttactgattgttgatatgatttaatggtccgtgctgtttgttctccaatagcaaaatacgacttgaattttggtacaaatccttcattaaaataataacgtactgccgacgaacttgaaaatgttaatgcatcgatttgttgatgttctatcatttctttaacatcttgtatattttgtttgttaggcactgaagtatataaatctattttaacaacttcattatctttagataacgctgctgataacaatggtctcgccaattcactcgaaggcaaaagtattttttggttagtttgattaaatgattttaaaaatccttcttgagaaaagtcgtttggcataaaatcaactcgaatgccaagtgattcacaatattgcgctgtcttacttcctatcacagcaatgttatcaacattaattctttttagatatttataaaagaatttcacagcatttttagatgaaaaaataagccagtcatagcgttgatttaacaaatgaatatcaaaatttagtggctttatatcaataaagggtttgtgaataattgatactaaatcactttgcatgtcatttgtttgtgtcataactacaactggcttcatatttaaacgtcactccattatttaatgttgttcatttaagcgttttataatttcataagcaccttgctcttttaatttgttactcacttttttgcctaactcaaccggatctgttccgttcattgtatattcaaatcgttctttaccatctggggtcataattaaacctgtaaattcgatttctttttgatctgagattgtagcatatcctgcgattggcacctgacaactaccatccatttctgctaaaaacgttcgttcagcagtcacacattttgcaacctcatcattatgtactttgcttaataatgttaatagttcttcatcgtcactacgacattctatccctaaagcaccttgtccgattgcaggtaacaatgtatctctatcaagataagacgttacgatatcatctgaccagcccattcgtcttaaaccagctgcagctaaaataatcgcatcataatcttcagtttgtaacttttctaatcgtgtatctatattacctctaatccatttaatctctaaattaggatacttagataatatttgtgcaccacgacgtaatgaactagtaccaataatactgccttctggcaattgggatagtggtgtatgtgttttagaaatatacgcatcaaaaggtaattctctatcagggatacaacctaatgttaaaccttccggaattacacttggtacgtctttaagcgagtgtattgccatatcgatatttttttcaaaaagttcatgttgtatttctttaacaaataagcctttgcctccgactttagacaattgtttatctactatacgatcgcctttcgtgacaatttctttaatttcaatttctagatttggctcgacagcttttaatttatcaataaattgctggctttgtgttaaagctaatttacttcttctggagccaacgactaatttacgcatgttcaattcctcctaggaacggattgctctagattattttctcaattcacaaaatgtgttgcaaaaaataaattaatcatatttaagcaaaataaaataatgttatagtatattaaataccttgaattcaaccatttgttgattctaagtaaaatataacttccatataatactgtaataattgaagagagtattaccttcgggtcaatgaatatacgttcaccaactgaaattacaccccactgtgtacctaaaataatactaaatatgagaattatccacccacttaacgttgagtaaaacacaattgattcaagtgtagcaacgctacctattctaaagtatttttgatcaaaacgcttttccttcaaattacggtattgcatgatatacagtaatgcattgacaaaagctaaggcaaagaagacataacttaacacagctagaccaatatggactaacagtaactcgtctacaacagcaattttctgaaccttattggtataatgtgtcggttgaaatgtattcatccctaaaagtgttaaccctattaaattcaagaaaaacacagagaaattcaaaactttgataaggttaagaattaaagagattgaaataatcagccaacttaaagtatagaatacatctgaaatagaccctaatggaatatgtctagtttgtataataaaaatagataaagagattgtttgtaaaacccaaacaatccccaataaatatatgcctaaacttctaatcttatgacttttttggacaaaatcataaaaatagcaaatgatactgattaagtatattaataatataatttcattgaatcgaataaacaggttttcttgcatattatcaccatattaatatgcttattcaaaactaaagatacgtcgcgctgaaatttccttgaccttgctttctttttgttgcttcgcttgctcatgaggacattcagcttcgatatcaaatatattttgaaatagctctaatttttcattacttttcttatcactacttaattctttggcctgtttaataggatctttcaacatttgattgatgatactttttgtatgtttagatataattttacgttctctttcgcttaaacctggcaatttacgatcaatactgtccatcgtttctgcttgaattgccatagctttttcacgtaaagctctaatcactggaacaacacccaacatactaatccactcattgtgtgcatgtatttctgcaggaatttgttccgaaattgttgcagccgctaattgtcgctcacgtaagtttgcatcaactaaaccttttaagtcatcaacatcataattaaagatgtttgtgatggcactaataccaggttcaatatctcgaggaactgcaatatcaatcaatactagtgaatcttgctttctattttctgcaattctttctatcatttcatttgtaatgatataagtttgtgcactcgttgaactaatcacaatatctgcactttcaagtaaatttggtaatgatgatagttcatcatatttcacttgatgctttgctgctaatttcatagcattttcaattgttctatttactactgtaatatcagtaattccagaaccaagaagatttaatagtgataattcactcatttcccctgcaccaataatgatagcttgcttacttttcaatttgccaaatacttttttcgccaactcgaccgcagcataagacacacttacagcattatcagctatatctgtttcattatgtgctctttttgcaaaagtaattgcctgtttaaatagatgattaaaaattgttcctgtcgtacctgtgctttgcgctaagaaaaatgcatctcttatttgacctaaaatttgagtttctccaagtacgattgaatctaaaccagaagtgacacgcaataaatgttctactgcttcgtcccccacttttacttctgacattgctttaatatcatctacttcaaatccaaatgcacgagctagaaatcgttgaatatagtaacgacctgtgtgaatttgatcaacaacagcatatacttcagttcgattacatgttgataatatgacattttctaaaatagatttagtttcatataaatcttcatgggcaattcgtaaggcatcatctctaaaagcaacttgctctcttagtgcaacatcagctgtgcgatgatttatactaattgcaataaaatgcatttgaaacgcccccatatatactaacaatacaaatattataacataatttaaaatccaattaagtacgatacttaaataaattataatctttctaatttacttttgagtttttgacaaaatgatgaacgttgaaaaatgttatcaattgtgtactaattaaaagttttgtgcttacattatttttaaaatttttgtataagttttgtcgtacaaaaactatgaaatatacggttcaattaaattccatatttgttgttgtttattattttgaattgatgaataacttacaattgtatcgtctggatccatatctaattgtgtcttaatatttttaatatgcttttgaacttttccttttggaattttgtcttctttagtacatataactaaagtaggaatatcaaaatgtttcaaataattgtacattaagatatcatcttgtgttggatcatgtcttaaatcaactaattgaataactaattgcaaattctctctcttagttatgtattcctcaatcattttcccaaatttttcacgttgtgttttacttactttagcatatccatatcctggaacatccacaaaaataagttgttcatctatattataaaaatttaacgtttgcgttttgccgggttgctgtgatgtacgtgccatattttttctaccaatcatactattgataaatgtagacttacctacattagatcgaccgctcagtgcaacttcagacaattctgtttctggatattgttcttcctttactgcactaatgattaattctatattattaggattaactttcattttgtatcctcacttttttatattctctttcaactctaccattatataatatttgaacctttcggtatacattataaaaaagctccgatcaaagttaaactatttgagcgtcaactttgattggagcttttcacttttataacacatcaatgattaagctgatgttttactattattaattaaattaccttctgcgtcgtatagttctggttcagtttcttcattaattgtttgtgctgtaataactaccttcgttacattttcgttagaaggcacatcaaacataatatcgattaacgattcttctatgattgaacgtaaaccacgcgcacctgtttttctttcaattgctttttcactaatggctgataaagcttcttcagtgaactctaaatccacatcatctaattccagcattttagtatattgtttcacaagtgcatttttaggttgcgttaagatgtttttcaacgcagttacatctaatgtttctaaattagctacaattggcacacgtccgataaattcaggaatcaaaccataggcttgcaaatcttctgggcgaatttgtgctaataatgcttgttcgtcatatttatcagcttcattgcttgagaaaccaataactttttcaccaagacggcgcttaatcacttcttcaataccatcaaaggcaccaccaagaataaataagatatttgtcgtatcaatttgaatcatttcttggtttggatgtttgcgtccaccttgtggcggaacacttgcagtcgtaccttctaagattttaagcaatgcttgttgaacaccttcacctgaaacgtcacgtgttatagatgtgttttcagatttacgtgcaattttatcaatttcatctacataaataatacctttttcggctttatcaatgtcaaagtcagctgcttgaattaatctcaacaagatattttcaacatcatcgcctacataaccagcttcagttaaacttgtcgcatctgcaattgcaaatggtacattcaacgtcttggctaatgtttgagctaataatgttttaccactacctgttggcccaattaaggcaatgttacttttttgtaattcaacatcatcttcttttggtcctaattgttgaatacgcttatagtggttataaacagccacagctaaagattttttagctttttcttgaccaataacatattcgtttaaatgatccataatttctttaggagtaggtaattctgtaatcgcttcagaagtgttttgagctaattcttcttcgacgatttctgagcataattcaatacactcattacaaatatatacaccacttcctgctacaagtttttttacttgatcttggtcttttccgcagaaagagcatttcaaattttcttcatcttcattgaatttaaacattctttttacacccctattcgttaaagactatactagattggatattacaatgcaacatattaacatacaaactttttgcttaaagaatagtagcagatacataagctatgcatctgctactcatttttgtaatttaatatttaatgaagattaatcttctttagttccttcaacgaactttgcgttatctcttaataaatcgataactttttggatacgaacatcatttttaatgatatcagtattacctaaagtatttttgatatcttcaactgagatattaaattgtttactcattttttctaattctttatcgatatcttcatcagtagcttcgattttttcagcttcagcgattgcagttaaagttaagttagttttaacacgttgttctgcatcgtctttcatttgctctcttaattgagattcatcttgacctgagatttggaagtacgtttgtaaatctaaaccttgttgttgaattctttgtgcaaattcagacaccatacgatctaattcagtattaaccattgcttcaggaatatcgattgttgtattatcagtagctttagtaatcgcttcttctttttcaacattttctgcatctgtagctttttgttcagctaaacgtttacgtaagttttctttgtactcgtctactgtatttgcttctgcatctaattcattagcaatttcatctgttaattctggaacttccttgaatttaatttcgttaacttttgttttgaaagttgcttctttaccagctaattcttcagcatggtattcttctgggaatgttacgacaacatctttttcttcgtcaactttcataccttctaattgctcttcgaaaccaggaatgaatgaacctgaaccgatttctaaatcgtaaccttcagcttgtccaccttcgaattcttctccgtcaactgaaccactaaagtcgatgttaactgtgtcgccattttcaacaacaccatcttctttaactaccatttcagctaaatgtcctaagctgtggtcaattgcttcttgtaactcatcatcagataattcagtttcttgtttttcaatttcaagacctttatagtctcctaatttaacttctggctcaactgtaactgttgcttcaaaaatgaaatctttacctttttcaatttgagtaacacttacttctggttgtgcaactggtttaatatcagtttcgtcaattgcttcaccataagcatctggtaataaaatgtcgatagcatcttgatataatgcttctacaccaaagcgttgttcgaaaattggacgtggtactttacctttacggaatccaggtacgttaatttgtttaaccacttttttgaatgcttgatctaacgctttgtttactttttctgcaggaacagtaacagttaataaaccttcgttaccttcctttttttcccaagttgctgtcatgtatatatacctccatgattaactaattttttttcaacttccctattatatcataggtctattccctatacaaacattgaaatcacaacgtttatatatttgtaaatcaacttttttcgtcaaaactatattaaaatgctgagtattattttgcaacaatttaactattattattcaaatctaattgctgaataaaattaaatgcatcgatactttgtaattcacatttaagtcctaacatatttttgaaataacattcgtatgcattaatccatttattcgtttcaaacaaagtttcaatatcaattggataaatcatgatagagtgattattcataatacggtgtgcttcttcagcgatatgtaaagcaccatcatttaatgtttccataacgttaggtataactttttctttcagtgttgtatgttctagcccttttaaattagctggtacaaaagttacatccatgccatacttttcaattgtcagttcttgtgtacattttgcgaaccttaaatactcaatcattaaactaattaggttataactgtacgtattagattttaatatatttaataccgtttcttgaaattgaaaatgaccattgtctattaacttcaaaatcaagtgcgtctgttccctcattgataacatatcaaaatcagttaatgactgagtcaatcgtttttcatcttcaattaattttgacttagcaaattctttaagaggatgtaatgccattcttgttttgtgatctttgacttcatcaataatttgatgaattacttctaccgcttcaaaatattgtcccaaaccaatcaaacttttcacgtaacaaatcatcaatgcatcatattgttgtatgccagttttcaataagacaattgtttcttctcttaattcaagaaatgaccccgtctcatataacatacggcatttcatcattgctatttcttcagtgagttcaaattgacgttcatattgtacaatatattcatacatcaggtcatagtttcggtcttgttcagcacgttttatatctttatataactttttcgaagagttaggaaactgaataatatctgacatatatgtcacctcgtttgattataaatcttgaaggattaatgcgctccacgtttcgaaatcatcatatgactctatgttgcctttttcaacccattttattcgtaaagtatctgtttctttagcttctacatcattcgtacttacagtgattttaaatacaacaccaatatgtaccttgcccacttcattattatcgtcattaataaaaccgatatattccatattttgtgaatcttgctcacttaaacctacttcttcttctaattctctctgtgcattaactctcaatacttcgttaatagattctgctcctggaacatcattcatatgaccgcctacacctattgaagattgtccatgcaatcgagcttctccaccgccagataatcgttcatacactaatatctcgccatgctcattttcaagtaaacaataagaaatgagttgtttatatgatggatcctcttccatatcgccacgtcgcttaacttcatattgacttagcgcatcaaaaatattttgaccttctggtttattcttatttaaaaacccattgaaagtattcttttcattattaaaaataatttctctaggtactacaatgatttgttcatcaaatttagacatcgtataaaactcctcactttaatgtttgttctcttaaatgcattttagcaaatatgtcatattttagcgattaaatgtggcattttgctatttaaaaaataaaaaagagatgacaatgccatctcttttttataagtgttattattttaaagcatctttagctttagttactaattgagcaaatgctttttcgtcagaaattgcaatttctgataacattttacggttaatgtcgataccagcttttttcaaaccgttcattaaacgtgagtagctcatttcatgttgacgagctgctgcgttgatacgtgtaatccataatttacggaagtcacgtttacgttgacgacggtcacggaaagcgtattgacctgatttcattacttgttgcttagctactttgtataatgtatgttttgaaccgaagtaacctttagctaatttaatcgtttttttacgacgcgctcttgttactgttccacctttaactcgtggcataaaaaattcctccttaggtaattcctaccgatttctgtatttgttcttattttttgtatgctaataattgttttacacgtttcatatcgctcttagacactaatctagctttacgtaattgacgtttttgtttagtgctcttgtttgcgaataagtgagatgtgaaagctcttgaacgttttaattgacctgaagcagttcttttaacacgtttagctgctccgcggtgagttttcatttttggcataatataagtcctcctgtaatagctttaattatttttcagctgttggcgctaacatgataaacatttgacgcccgtccattttaggtttttgttcaactgttgctatatctttgcattcatctgcatatttttctagcacacgttgaccaatttccttatgcgtaatggcacgccctctgaaacgaatagatactttacatttatcgcctttagttaagaatttacgtccgtttttcaacttagtttggaaatcatgttcctcaattgttggacttaaacgaatttctttaacattgataattttttgtttctttttcatttctttttcttttttctgttgttcgaatttgaatttaccgtaatccataattcttgcaactggtggtttcgcattcggtgcaacgaccactaagtctaaatctacacgttcagccatttctaaagcttctcgctttgatttaacaccaatttgttcaccatcttgaccgattaaacgtaattcttttgcacgaattttgtcattgatttgagtttgatcttttgctatggttgacacctccaaaatttttacgaaatttgcaccaagcaaaaaggaagagcaggtataaaatacccgctcttccttatacacagttatgtgtaatgtgattaacctgccaactgctttatgcgtcgctacaggtgagaagcgggtgcttctacttggttcgtttcgtattcaacgttgttaatcatatcaacaattcacatttaagtcaacactataactgtaatttttttattttaaccttttatttcatccattgacacgtcttgacgtaaatctacttgttctaatggaatttttttcgttttatatcgaagcttatgataaataaagaatgctaaaaatactggaattcccatatacgtaattaggaagcggctaaaattaaaatctcctgttttaataaagtccacatcttgaccgatgattacaacaatacataagattgctgcaaaaataggtccgaacggaaacaatttagctgtatatttcaatttagatttatcataattttgtttatcaaatgctcttctaaatcggtaatgactcactgcgatacctacccaggcaataaagccagtcaacccacttgcagcaacgatatattgataagcaccttctgtaacactttgtaccacaaatatgatgactacaataattgcagttactaataaagacatatatggcacaccatttttatttgttttcccaaatgtttcaaacgccaatttatctttactcattgaataaagcatacgcgttgaggcatacattccagagttccctgctgataaaactgatgttaagataacagcattcataaatgaggctgcaaaagcaaatcctgcatttttgaaaactagcgtaaacggagaggttgcaacgtcattaccgcctcccattaatgcactactatcataaggaattaacataccgataacaaaaatggctaaaatataaaataataaaattctccagaatacttgtttaatcgctttcggcacagcacgttcaggattttctgattcgccagctgtaataccaattaactcagtaccttggaatgagaaaccagcgattaagaatacacctagaattgataacaaacttcctcctaggttgccacctaaaataggtccttcacctttattaaatatttcaaatcctacaaaatgtccacccataattcctacaatcgttaataaaccaatagcaataaaaacgataactgtaacaacctttattaatgcaagccaatattcactttcaccatagacacgaaccgataacgaattcagactaaaaattataactaagaacaacgcactccatgcccaagcgggtatgccttgcaatggtgtccaatattgaatgacttgtgctgcaatcgtaatatctgctgctacagttactacccagttaaaccaatagttccaaccaagcgcaaaccctaaagatggatcaacaaatcttgtagcatatgtactaaatgaacctgatactggcaaataagtagccatttcaccaagtgacgtcattaagaaaaataccattattccgataattgcgtatcctattaatgcacccaaagcacctgcatcatgaattgctccaccagaagttacaaataaacctgtaccaatacaacccccaatcgcaatcatagaaatatgacgatctttaagtccccttttgacaacattgttactttcattttgaacttttgacatataagctccctttccatgttttagaggccaagtaataaataacctttatttactttcataccctttttttacagaacatagtgatattaaaagtaaaaaagtggctacatacctttaagatatgcaaccactttggcaattatctatataaggtagcacatcacattctgtgacagtacagttcctattcgaaaactgtcccaatagatataatttatggttcatatctatttcggcatctttacctttcacttgttcaacttatgtaccataaatacttctgacaagttactaattaaacatgcaacctctaactcaatttaatattttaactaacttgtaatatacaggattcatcacgcataatcaaccctgtaaaacttgatacgcaataaaagtttcaaagcattttattgcgacaactgtctatctatgttttttcaaacgaatttcatcaactagattccagataaattcatctttttcaactgtttcttggtcttgtgatccatattgacgcacattcacttgattattttcaacttccttatccccaactacgatttgataaggtattttttgcatttgagcttctctaattttataacccattttttcattacggtcatcaatacttacacgaacgccttgagatttcaattcgtcttgtaattggcgcgcataatcataatgtaaatcaacgttaactggaatgatttgaacttgttttggcgctaaccaagttgggaatgcacctttagtttcttcagttaaaaatgctacaaatcgttccattgttgatacaacaccacgatgaataacaactggacgatgatgttcaccatcttgaccaatataagttaaatcaaaacgttctggtaataagaaatcaagttgtgctgttgataatgtctcttctttacccatcgctgttttaacttgaacatctagtttcggaccatagaatgctgcttcaccaatcgcttcttcgtacgataagccaagctcatccgctgcctctttaagcatattttcagctttattccacatgtcatcatcatcaaagtacttttctttatcttcaggatctctataacttaatctaaagctataatcctcgaaaccaaagtctttatatacatcaataatcatgtttacaacacgtttgaattcttctttaatttgatcaggtcgaacaaagatatgtgaatcatttaaagtcataccacgaacacgttgtaatcctgatacagcaccacttgcttcatatctatgcatagttcctagctcagcgatacggataggtaattcacgatatgagtgtggtttattcgcataaatcatcatatgatgtggacagttcattggacgtaataccatagattcagtttcatctaactgcattggtgggaacatatcttcttgatagtgatcccagtgaccagatgttttgtataaatcaacattagcaagtactggtgtataaacgtggtcataacccatgctaacttctttatcaacaatgtaacgttcaatttcacgtctaattgttgcaccgttaggtaaccataatggcaaaccagcaccaactaattggctatttgtgaataattctaactctttaccaattttacgatgatcacgttctttacgctcttctaacatttgtaaatgtgcttttaattcttttttatcaaagaaagcagtaccgtatatacgttgtaacattttgttgttactatctccacgccagtatgcacctgctgtagataatagtttaaactctttaattttagctgttgatggaacgtgaactccacgacataaatcagtaaaatcaccttgactatataatgttacattttcatcttcaggaatcgcgtcgattaattctaatttgtattcatcattgctgaataactctttcgcttcatcacgtgaaaccacttttcgttcgattttcatattttcgttaacgatttgtttcattgttttttcaatttgttcaaagtcatcagatgagatgttttggtcaatgtcgaagtcatagtagaagccaccttctattacaggaccaacaccaaatttaacattaccatataatcttttaatcgcatgtgccattaaatgtgcagtagaatgacgtaatacctctaacgcttcttcactacctggtgtcacaatttcaattgatccatcagtttcaagcggtttagttaaatctacaagttgcccgttaaatttgccggcaacagcttttttacgtaatccaggactaattgattgtgctatatcttcagtagtagtacctttatcaaacgcctttttattaccatctggaaattgaatattaatttgttccatgttaaaccctcctatttgctttataaatacttttatctgacctcgttaaaatattgaacaacaatcatcgttttaacattaaacctattaacaataaacagggaatttatgacaccaacgaacatttttgtctaaaaaaacaaaaaatcccgcccctatacaagggacgagatcgtcgtggtaccaccctagttatttaatacaaattatgtattaaatatctctgcttaagataacggtcttgagccgggtattcattacaaataccataaatgaagtagtaatcatctaatttattaaccatattctcatcaaacaatggctttctgtgtaatattgattagatcatcttgtcttcaatcatttaaacgatttagatttgtattcattatacaccaatcattttaaaattcaattgtttctgaaattttctcctgataaaaagtatggtgttgacaaagatttgacacgttcaataatacgtgctgctttagtcttctcttcaccatcacgagtcatcgctaaatgatgttccaattcactatagtcaaaattagaactaaagaatgttggtaattcatgaaccattcgataatgtagcaaaggtccaattacctcatctctcacccatggagtcacttcttcagccccaatatcatcaagcattaaaatgtttgcttctcttacgcgatgtaatttcttttcaaaagaaccatctttaaagccaccttttaatgttctaataaattccggtaaataaataattgtcgaacgtaccttcttagatttgagctgattcgcaattgcacctagaataaaagatttacctgtcccaaatggaccataaaggtaaagccctttcacttgttccccattagttattgctgtacaaatatcatctgctgccatagctacatcaagacggtctcgatgattcatataaatatctttcaatttggcatttaaagtatctcgttgcatatgatgagatgtaattagctcagcttcaaagcgttcttcgtcgtacttgattttacatgggcattgtaaatagcgtattttaattcggttattatcaacatataactcaggcacatgcccctttacgaaatttggacaatcagcaaatttatgaccgtcataatgtttttgttgatctttatactcttgtaacacatttaagtcttcatcaatcatagcattcgttaattcagctcgatgcgcttccaaaaattgcttaacatctgggtcattgattacttctttttttatcttttctattcttttttcaaagtcctgcgacgtgttaattatacttttaaattgcttcattattgactgtcctcctcccattttttagataatttatctagaaatgcttgtcgatcttgctctaattgttgatcatctacgctattatctttagccgaatcttcttcactaggtttatctctattttctaaccatttaggtgttttttcttttgaaatgcgattgcgctgcccatagtacgaaccacgcttttggtaatttccgctagacccctcatttttaggttgattaacttttttagcgtaattatatgcttctttagctgtcttaataccttttttcttccaatttgatgctatttccaaaatatacgctttaggaagtttcatatcttcttttaacatgacaaattgcaacaaaatattaatgacgccaaaagacattttttcacgttctattaattcttcaaccattgtcttttgcgatatagttggttctgattcagaccaagaagctaacatatcaattggactcgtttgttcaagtaattcaaaccattcatcactttgtggctttggattcacttctgaagatttggccgtcgaagatgatgtagcaggagatttcacctgtaatttaggcatttgattttcgtgttccattaagtaatacgagcgtgcttgtttacgcatttcttcaaaggataactgttgtccacttgtaattgaatttaaaataacatgcttcatgccatctgctgttaaaccatataaagtcgcgagttgtgtaattaaacgctttgcatctttggtaacaatgtcttgactaataaaatgtttacctaacatttgtctcaacatttcaaagtcaaaagattcatttgataaatcgataccttggtacggttcattaatcggaatatcacttgtatcgatatctatttttgtagacggcactttaaaaacatcagtaaattgtctcgttacctgtttaaattcactcaaatcaatttgttgatactcaaagtatttcttcaactcatgaaatcgacgatgctcaacttcactatataaaaagattgacaacattggatcattaaaaaataaatgtgctgaaggcggttgaattaattggtaaacaaattgtgtttcttgttcatcatgtttgacaaacgcctttaacaatccaatcgcttcaagtaagtccatttgttgtctaaactctagtaaattaattttaagttcattcataaaaatataatgagaaagaatcaatgtttcattatgactttctttaacgaattgagtcataaaatgatataaacccactgcttgtgctccaattagcggtgtatacagtcgattcaatacctctaaatgattcgtatttaaatcaaagtgttgcataactttgaattgatcctttggtcttaagccgaattcgaaggcttgtcgtcccatttaagcatcactccgtttgttttcgcttaaaatcccttgcatcgatgctaacaattgatcaacatctttaaattctttatagactgatgcaaatctaacatatgaaacttgatcaacatgcattaacaagttcataacgtgttcacctatatctcgtgaagacacttccgtatgaccttcatctcgtaattgccattcaaccttgtttgttatgtcttcaagttgttgatatctaactggtcgtttctcacaagaacgcacaagtccattaagtattttttctcttgaaaactgctcccttgtaccatcttttttcacaactataagctgactaacttcgatatgttcaaatgtagtgaatcgtgttccacaattttcacattctctccgtcttcgaatggcatttaattcatcggcatgccttgaatctacaactttagattgtgtagaattacatttcgggcatttcattacatcaccctctttattttgattatgcctaattatactataaatctagagatgaaaaaagaatccctcaatttaattcatttaaccaaataatgaaacaataaaaaacattatatcgttacatattaagtaatatgcatgacaaaattattgtattaaaaataaaaaacctaactccgaagtcagagttaggctattaaataattgtattaacttgcacttacagtttcttttgatgtcaaaagtgctccaatttgctcagcaacatctacaactctatttgaataaccccattcattatcataccaagcaataacttttactttattccctgacatgaccattgttgattttgcatcaataatagctgaatgtggattagtattgaaatcaacagacactagtggttgatgttcgacttcaatgataccttctaaacctgcattttcaaaagcttggtttacttcttctgcagttacttctttttctaaatcaacaactaaatcaacgagcgatacattctttgttggtacacgtaatgccatgccatgtaatttaccttctaattctggtaatacttcttttaaagctttcgccgcaccagtagaagtaggaataatgctttcattacatgagcgtgcacgtcttaaatctttatgtggattatcaatatttttttggtcatttgtaatagcgtgaacagtagtcattagaccattaactattccaaactgattatttaaaacttttgcaactggaccaatgcaattagtagtacatgaagcattactaaaaatgtcaaatgcttctatatctaattggtcatcatttacgcctttaactaccatttgaacatgtccaccttttgaaggaccagttaacaatacttttttggcacctgctttaatatgtgcgatggctttatcaccatgattaaatttaccagttgcatctatagcaatatcgatatctaattctttccatggcaagttttcaggattgcgatcagcaaccaatttaattttatgatcaccaacttgcaatccattttcaatcggttcaacttttagattatattttccatgtgttgtatcgtaattgattaaatgtgcaattgtttcgggtggataactagcatttatcgctactacatttaaatttttattttgtaatgcaatacgtaataccattcttccaattctacccataccattaattgcaatattcgttgacattaaaagcaccccttgatttttatgtgttatactttatggaattagtatagcatattatatgaaatttgaaagcgttttccgttgatttatttatcttttttataaaaaatagtcattacttacatacatcaacgcgtacgtaaagtaatgacttatttatagagtaatattaatcttcttctccgtaattcggcttttcaatataaccttcttcttctaacaatctctcaaggttttgttttaattcaagtttatcccctaaattatcgataacatgatcggccattcggctttttttatcaatagaaatttggctatagacacgagctttcgcatcttctaatgacaaattattacgttgcattaaacgatccatttgtatactttcagaagtgtatacaacccacacttcgtctactgtattttccaattcattttcaaataataatggaatatccatgattacattatatccttgttttaaatattcttgcttttcttcttccataatatctcgcacgataggatgtatgatagcatttaattctaagcgtttttctggatggttaaacactaaatcacccatataacgacgattcatctcaccattttcatcaatagcttcatcaccaaagacttctcgtacttgagctaaacctttactcccctttttaacagcttccctggctgctttatcagcatctactactttaaaaccgaatacggataagagttctgatactgttgattttcctgaggcgattccacctgttagaccaataactttcggcataatttcactctttctttatttttgacatactggacaataatgactatttcttgtcgcgatgatttttgtttcaatttgacttccacacactttgcataccggctgcttatatacattaagatgcaattgcatctcaccagtttttccatcagcatgacgataatctgaaatacttgtaccgccaaatttaataccttcttctagtacttctctaacataataaaaaaccatttcttgttgttggtgtgttaagtcttttacttttttatctggtaaaacacctgcacgaaacaacgcttcacatgcgtaaatatttccacaacctgcgattactttatgatccaaaatcacttgtttgattggtttattcttattagactgttgatgaattcgatttaaataatacgtcaatgcttcatttgaaaaaggttcaggcgctatttctaaaaatgaaggataagatgctacagacgcaacatttctaatttctccaaaacgacgtatatctgaataaattaactttttgtcatttgacaactcaaaaataacatgccaatgtttacgataattaggtatcataatatcttcaagttcatttacaatgaaaaaaccacccgccatacctaaatggctaattaatgtacgttgttctcgtttattatctagttgaaaaacgatatatttacttcttcgttctacattagtaatggtatagccttccgataaagttttaaaagtatctaattcaattccttttataattgtttccttgccttgagctttaccttcgattactttatccgaaaatataacgtgttcaattttttgatttataacgtagggttcaattcctctttttacatgttctacttctggtaattcgggcataccattaacctcactttattttgcatcataccaagttgcaccataacttgagtctacttttaatggaacatctaattgcaatgcattttccattatctcttctacaaattcactaaatgaatctacttctgacttaggtacttcaaaaattaattcatcgtgcacttgtaataatagtttagcttgatatgttgtctctttcattttttgcgcaaatttaaccattgccagtttaatgatatctgcagcactgccttgtattggcgtattcatagcagtacgttcagcaaagccgcgtaaattaaagttacgactcgtaatatcaggaatatagcgtcgacgatgtagcaatgtttccacgtaacctaaagctttggcatcttttacaatatcagacatatattgttttacacctgggaaactagctaaataatcatcaatgaatgcttttgcttttttacgagtaatacctaaactttgacttaaaccataatcacttatcccataaacaattccaaagttaaccgcttttgcttgacgacgcattaaactatcgacttgatcagcttctacaccaaatactttcatagcagttgctgtatgaatatcatcgccgttgataaatgcttctttcatactctcatcttgtgtaatgtgtgctaatacacgcaattcaatttgagaataatctgctgataatataacgctatcttttgaagttggtttaaaggcttttcttattttacgcccttcttcaagtctaaccggaatattttgtaaattaggatctacacttgataaacgtccagtttgcgctaaagtttggttaaaacgtgtatggatacgttgatcatcactaattaccttttgcaatccttcaacataagtagactgtaacttagataattgacgatattctaaaatataatcaatgataggatgttcaccttgcaattgctctaagacatctacagcagtagaatatcctgttttcgtctttttaataacaggtaattgtaatgtctcaaacaatacaacacctaattgcttaggagaatttatattaaaatcttcaccagctgcatcatgtatatttcgaattaagacatctaatttttcttgaatttctttttccatttcttctaaatcatgaacatctgtatatataccaatttcttccatttcacttaaaatcttagctagcggtagctctaaatcagctaagagttctacctgattgtattcttctaattgtttatccatatttggtttcacaaagtaaattgcatcagtaatagaagcaacatatggatttaaaacatcatcttcaggcaccttaaatttcttaccttttccatatatactcacatcgtctttcacaaaactttgaccgtacaatgaaacaactgattgaacatcactaatcgtacgagatggatcaattatataactggccaacataatatcgaatgaaatattttgaatatcaattcccaatctatgtgatgctacatatgtttttttagcatcatatacgacttttttcgtattcggattttctaaccatgaaactagttcggcataattatttatgtcatccgcattaattacaatatgtttctcacctgtaaataaagagaattttaaaatattatttcgcaaatagttaccaccctctaattcgaaatggatggccgcttctttcaatgaagtaaaatcaacattatcaaaagacgtttcaatttcaaatgtcttttctattgcatcttcaacgcttgctgattgatcaatgtcagccaacaattgtttgaattctaacttcttaaacaattcgattttttcttgttgttcatcttgatgagtcattaacgtatcttcaagttttacttcaatcggactatctacattaatcgttgctaattctttactcattaatgcatcttctttgctattttgaagtttttcttttaactttttacctgaaatttcatctaaatgttcatagacaccttctactgagtcaaattggttcagcaattttattgctgttttctctccaacacctgcaacacctggtatattatcagaagtatctcccattaatcctttcatatcaataatttgattaggtgttaacccgttgtatttttccgcaataaagtcaggtgtataatgatcaacatcagtaacaccttttttagtgtaataaatggttacattatccgttgcaagttgtgttaaatctcggtctcccgtaataataattgtctgaaagcccgctttatctgcttctttacttaaagttccgataatatcatctgcctcatagttatctaattcataacgtttaatatgataagcatctaataattggcgtatataaggaaattgctcacttagttcaggtggcgttttctggcgtccgcctttatattcactatatttttcatgtctgaaagtcgttttacctgcatcaaacgctactaaaaaatgatttggcttttcttcttttaaaatcttctctagtaacattgcaaaaccatatactgcattggtatgaatgcctgctttgtttgataacaaaggtaatgcataaaaagctctaaaacttaagctattaccatcgattaatactaatttattcacaattttaacctccagaactaatttatatatattttagcatattcgactgtgatgtcgtaattaaagaactatctcatagagtatttatacacgacctaatttcaaataaaacaagtgactatatagactaagctaaaaaataaaaaagacataatcatgattattcttgatgagcactccataaagtcaggttaaaagtccaacttttgagatgcacattatcatttcatgattatgtctactttttaatatttttatgctgctattttaaatttttataggtaagaataagttatgaatcgtcagaaccaaatggaatatatttaactttggtcattttcggtaattcttcataattattaaaccactcttggtaatttttattgattggtgacggatgatgcatataatgttcaaacggcaatgattccactgtataaacctcttgtcgtggatgatctttaatttgttgttttaataactgaactcttttttcatgttcataatgaacataaataaatgcactaagatatatcatagctaaaactagtgatgcacctttaataaaattaacattgattgacttatatttccgaaattcttttaataaaataattaaaatgattacatgtatcgtataaacaatcaaaaaattacctggttcaattggagtaacaatgactagtgtcgacgccgaaacacatattgcaataagtaaggaatataaagtaatttgtgttttacgatcattaatagacaaataaatacctacaaatatcgaaaatgcaaagtaaccacatacaattatgttcgcaaaaccaaccaatccaatatctgtatttttatttaataaaaactgattgtaaaatagtaaataataaagcggtaaagtgataaatcctatcataatgatacgacgctttaatattgttaaatgtacataccgatcacttctaagcagtagataaataataagcgctgcaatcatacttaaaattataacctgactgaaaatgacaccatatggaagtgacgttgatatcatttctgcaaattttgaaaagataccttgattattagaaacttgttgatattctgatccttcaaataaaattttgcgataatttggattggaaaacataatgattgtacctatagtagcaatcataaatgaaaacaataatttataattaagtgttcgatttgcagtaaattcatacagaaaagctaaaattaaaatgatacagtggaataatgtcacattctccataaataattgaccgaagaagcataaaacatagaatagtactgtaacacttaccggctgcttttctttatatataattgcattaatacaataataaatgataaagagtgaaattagtgttgatgtcgcataattataaaatcctgcaaaccagccatatgtatctgcataaatagcacttggtaaaattaacattaaagaaaatgctaacaaataatagcttgtccacgctttacaacgtgtaatgtgcataatcatccaaatgatacccatactaatgagaccatatgaaagccaacgtaaccagcttacatgtacagctataatttcaaagatatttccgatatagcgaccattaagtgatgcaaatcctacttttaaaatatcagtattataattgctaaaccattgtaaatcatcgtgcatgagtggtagtaagatacccataaaagtataaaacaataatatcgcaattaatatcaaagttgtcttgtgtaattgaattgttttcactttgctaatcctcaaatctagttaaattttcctcaacttgtaggtcgaaaaattaattcaatatttataatgtatttctaattttcacctatgcatgtttcctcaatcaaattagataaacaaggtatttaatattacttttcaacaatttatctaaatcgcccctcgtctttttctatgacgaatgattacacttgtgtattcaagtgtttaaattaagatttatttccgttcaaataaaacttattactttttaattaagcatctattttaagtgcgttactaaaatttctttattataataaatatattataaaattgcttgattcacaacaatctattacttataacttacaaaacgacatatgcaaatgacaaaattgacaaccgagtttattccacttcattaactctaatttaataccaatagagatttgaacgaaataaaaaagcagcaacaacttcgtgaaaaatacacgcgctgttaccactttaatttttattctttataatcttttagaataactttgaacgttgagcctttgccaacttgacttttcacttcaatattgccttggtgggcctctactatatgctttgtaattgataatccaagacctgtcccaccagaatctctacttcgtgctttatctactctataaaatctctcaaaaatacgttgttggtcttctaatttaatacctataccaaaatcttgtacttcgaaaatgacacgaaagtcatctcgatacacacgaacgttaatatctccaccttcataagaatagttaattgcattcgttaacaaattcgtgataacttgagcaattttactttcttgcgctttaacaatgacatctttttcaatatcagtatgaatggaaatatttttttgattggcttgtgtcatcatattatcaataatacgccgcgttaaatctgataaattcatatagtctgtatctaactcggtatgttgctcaatatgcgataaatctaacaaatctgttactaaagattctattcgatttgattcttttaaaattatgtttaaaaacatgtctaatgattccgcatcattttttgcaccatcaataagtgtttcagcaaaccccttaattgaagtaataggtgtttttaattcatgtgaaacatttgctacaaattcacgtcttaaattttcaagttgtttcagatttgtaatgtcatgcatcacaactaaaatcccttgcaaacttttttgagacctagttaaaatcggaacgcatgaaatgtcaaagtacttggcatggacttggtttattgcaacttccaattgttcatagataggtttttcaactttaaaactttctaaaattaattgctcaatttcagtattaacatagccgtgatagcctacttgttcaatattatgcgagatgttgaactgttcgtaatacgctttatttgcaacaacgatttttccatttcgatctatcattaaaatagcacttggaatattttcaatcgttgtttttaaacggttggattgaattttttgctcattattaagcttttgaaggcgtcgtgctaaatcattggtagacacaaaaagcgctttagtttctacaacattactttcaggtacacgtatgtgataataaccatttgccaacaattgtgttgcataagtaacttcttgaatgggacggattagtgtacgtttaaaactacggcttgcaaaatacagacagataagtacaactaaacatgtcaatataagatatttccacaacgtccaatgcatttctgtaatatcattattgtaacctttaatccacacatgataaccgttaaccttcttattaaaaataaaaatgtcctttttttgaatatagctatcactatttttggtagctttcagtttgccactactaaacacctttttatcatttttagttatcaataaatctatattttgctgttttacaatttctttaactttatcaatctcattatcttcgaccaaataaatatatgatcttgcatctgttgctagagcttgttcgtgtttttctgataaaacatatgtgatggaagcgtgaataataatgcctaatgtaacaaaactgataattaatatactgcttatcaataacattaagcggtggtgaaacttcatcattgttctttaggtctttccaatttatagcctaagccacgcacagttttaataagttgtggcttcttaggattatcttctaatttatctcttaaatgactgatatgtacatcaacaattcttgagtctcctgcaaattcataattccataccgtatttaacatatgctctctcgtaatgactctgccttgtctttctatcaaataaagcaagagttcaaattctttcggtgttagctccaataactcattatgcttatatacttcaaaataatcgggtctaatacgtatcgatccgatggtaatatcatcgtcaatctcttctacttcttttacaaattgagaacgtcttaaaatggctttcacacgggcaacaacttctctaggtgaaaaaggcttagtcatatagtcatcggcacctaattctaaacctaatacccgatcaaattcatcatttttcgccgttaacattaatatagggactaaatttttatttgttcttacagtcttacatacgtcaatgccatcttttttaggtagcataacatctaaaataattaaatctggctgttcattttctaccttttctaaagcctcatcaccatcaaatgcgacaacaacttcataaccagctgtttctaagttatatttaagtaatgttacgattgaatgttcgtcatctactaccaacactttttgcgacatggtatgcctccctaacttataattatatttacattataaccgaactatttataaaaataacatcctacacattatctttacacattttttacattactttacacataaataaaatacttcttatatttccttctataatttgcatgtcttactctgggacaacgaaataaatttgtgaaaatatcatttctattccactacctatgcatgagttttactcatttattcctaagcttatgtacacattcgctttggttaatgtgtaagaaacactacataatcaatcattagtgactctttattatttctgtcctgttgccaacttcaattcatttaaaaaggcgaacctagcaattaaagttgctagactcacctaagtttattttgcttattttaaatttttaatcaattcatctgcaaatgctgatgtagaaacttcttcagcaccatccattaaacgggcaaagtcataagtaacaacttttgaagcaattgtatcttcaattgaatctgtaatcttatctgccgcttcttgccatcctaaatgttctaacattaatacagaacttaaaattactgaagatggattcactttatttaaacctgcatattttggagctgtaccatgtgttgcttcaaaaatagcatgacctgtttcataattaatgtttgcacctggcgcaataccaataccaccaacttgtgcagctaaagcatctgaaatatagtcaccattcaagttcatagttgctacaacatcatgctcagctggacgagttaaaatttgttgtaagaaaatgtcagcaatagaatctttaatgattatcttgccttctttttcagctttttcttgtgcagcattagcagcatctctgccttcattttcaacaatttcgtcatattgttgccaagtgaatacttgatcaccaaattcagttaatgctaaatcgtaaccccactgcttaaatgagccttctgtaaatttcataatattacctttatgaactaaagtaactgatttacgattattatctatagcatattgaatagctgctctaactaatcgctcagtaccttctttagaaactggtttaataccaatacctgaagtttctgggaatcgaatgtttgtcgcacccatttcgttttgtaagaagtcaattacctttttaacttctgttgtaccttctttaaattcaataccagcataaatgtcttcagtattttcacggaaaataaccatatcaacatcttgtggacgtttaacaggtgatggtactcctttaaaccaacgtaccggtcttaaacaagtaaataaatctaattcttggcgtaaagctacatttaatgatctaataccaccaccaattggtgttgttaaaggtcctttaacagcaattaaatattctttaattgtatcaagtgtttcttgaggtaaccattcgccagttgtatcaaatgctttttggccagctagcacttctttccattcaatgcgtttttcgccattataggctttctccacagcagcatctataactcggcttgctgccttccaaatatccggtccaattccatcaccgataataaatgggataattggttcattaggtacgtttaatccttcagttccttgagtaattttttctgcagtcatagttattttacctccaaattttacatcttcatttttaatttgtattgattattttctttcttcaagcgggatatacttacgattcgtttcaccaatatatttcgctctaggacgcataattctattatctttatattgttctaaaatatgagcaatccatcctgcagaacgacttacagcaaagattggcgtgaataagtcatgaggtatttccatacagtgataaacactcgcactataaaaatcaacattaggaattaatcctttttcttctgccatacgtttttccattttcactgacatttcaaataattcttcacgaccagcgtctttcgtaatttgacggctcatttctcttaaatatttcgctctaggatcaccatctttatatacacgatgaccgaagcccattactttatctttaatagcaaatttttcatctaagtaagcatcaacattttcaattgacccaatctcagataacatcgtcataacttgttcgtttgcaccaccatgtaatggccctttcagagaacctacagctgctacaatacctgagtacatatctgacaatgatgataccgcacaacgtgctgtaaatgcagatgcgttcaactcatgatcagcgtgtaaaataagtgctttattgaaggcttctacttctatatctgttggtaattccccacgtaacatatataggaagtttgccgcataacttaagtcaggattaggcttaagtggttctttatcttgtcttactcgagcaaacgctgtaactaatgatgctactttagcctgtatacgcattgctctttcataacgattttcatctgattcattttcagcatcaggatcgaaatgtgcaatatatgataatgacgtacgtaatgctgtcattggatgcacgtgatctgtaacatactcctcaaaatgtgtatacacacgaggatttaatgtcatgtattgatttaatttcccttttagatgagcaagctcttcttcatttggcaatctatagttccataataggaaaataacttcttcaaattgcgcattttcagctagatcatcaatatcatagccggcataagtcaattgactttcaataattgaacttattttagtctccgctgcgataaccccttctaaacctctttgtaattctgccatgataaatttcccctttactgtttctttatgaaatggctttcaactaatattatagctaaacgcatttcgtttgtgaaatataaaaactgacattatatgtgcaacaattgttttgtaaatctatgtaaatgtcacagaatagccacaaatagcaccattaaagctttttcaagatgtgaataatccatgaattttacaatagaattaaattttcaattggttattatatatgattataaaaaccaaagtatattaacatggaattttacacatttttaccgaaaataattgtatatatctcaatataagtgcataataaacatatctatatttaagggagatgtattatggctgaaaaattacaaagggaactgagcaatcgccacatacaattaattgcaattggcggtgcaattggtacaggcttattcttaggtgctggtcaaacgattgcattaaccggcccttcaattctattaacatacatcattataggatttatgttatttatgtttatgcgaggtttaggagaaatcattatacagaatactgaatttaaatctttcgcagatgtaaccaatacatatattgggccttttgcaggatttgttaccggatggacatactggttctgttggattattacaggtatggctgaagtaacggctgtggcaaaatatgttagcttttggttcccagaaattccaaactggataagtgcactattttgtgtactgttattaatgtcattcaacctacttagcgcaagacttttcggagaattagaattttggttctctatcattaaaatagcgacaattattggtttaatagtagttggtttcgtcatgattctatttgcatttaaaactcaattcgggcatgccagtttcacaaatctatatgaacacggcatattcgctaaaggtgcttctggattctttatgtctttccaaatggcattattctcatttgtaggaattgaaatgattggtgttacagctggggaaacaaaagatccagttaaaacaattccaaaagcaattaacagtgtacccattagaattttaatattttacgttggtgcgttagcggttattatgtctattatcccatggcagcaagttgatcctgataacagtccattcgtaaaattattcgcattgatcggaattccgtttgctgcgggcttgattaattttgtagtattaaccgctgctgcttcatcatgtaacagtggtatattctcaaatagccgtatgcttttcggtttatcaagtcaacaacaagcacctccgaactttactaaaacgaataaatatggcgttccacatgttgcaatctttgcttcatcagcattattacttgtggcagcattactaaactatattttcccagatgcgacaaaagtatttacgtatgtgactactatctctacagtgctatttttagttgtatggggtctgattatcattgcatatatcaattatagtcgtaaaaacccagatctacataaaaatgctacgtacaaactattaggtggtaaatatatgggctacttaatatttgtattcttcatttttgtgttcgggttattatttattaatgttgatacaagacgtgcaatttattttattcctatttggtttatactattaggatttatgtacttaagatataaacgtatcgctgctaaatcaaataaataacaacaagttttacccctgttgaatatattaaagttcaacaggggtttttatatgcaacttataatattaaattgcgtacttggttcaatacttttactttctcatctatttaataatgtatcatttcagaaatacatcgatacttctattttataataactttccaaagtaatatgagtgaaagtttaaaggtgataacgtacatgtataaaagatataaacatttatatagattgccattcatacactatcattatcaaataacctattaattacgtcataaaataccagatgaaccaaaaaacgcctttccattgttgataaatggaaagacgttttttataaattatagtacgtttgcatatccttcaaagattttaccttgagcagcatcaatcgtaactaacatgttattgcttatgtttttaacagctttttctacacctacaactgttggaatacctttttctaaaccaacaattgcacttggtgatgtaataccattttcttctgtaattaagcctaaagctttttctacataaggtacaaacgtttcatcgattgagttagtaacgataactttgtcagataaatctttaccttctaaatctttaacagtttcagcaactaacgtagtaccaacaactgatccacgtccaataccttgaccattagcaatttcgtcaccaactaggtggattttcatcatattagtagttccagtttcaccagttggtacaccagcagtaataatgattaaatcaccattagttactctaccagtttcaacagctgttgcaactgcattgtttaacaatgcatctgtactcttacgtccttttttaactacaggttgaacaccccaaacaattgaacattgacgtgcagtttcttcacttggagtcaccgcaataatgtctgaatgtggacgatatttagagatagtacgtgctgttgaaccactttcagtagcagctacaattgctttaacatttaagtttaaagctgtatgtgcaaccgaaataccgatagcattcactaatgaagtttcaactaatttagtacgatctgacaataactttttgtaatcttgggctgcttcagctgatacagcaatatttctcattgttttaacagcttcttcaggatataaaccagcagcagtttcaccagataacattactgcatctgtaccatcatagattgcgttggcaacgtcactagcttctgcacgtgtagcacgtgggttacgttgcatagaatctaacatttgtgtagctgtaataactggtttacctaatttgttacattgtctgattaaatctttttgaaccattggtactttttcaggtggaatttcaacacccatgtcaccacgtgcaaccattaatccatcagacacttcaagaatttccgcaatattatcaataccttcttggttttcaattttagggaatactgaaatgttagctttttgttcttctaaaatttcacgaatttctaaaacatcactaggacgacgtacgaaacttgctgcaatgaagtcaacattttctttaataccgaaacggatatcttcagcatctttttctgtaataccaggtaaacttactcttacaccaggtaagttaacaccttttttgtttttaagctcaccagagtttaaaatatcacatttaacttcttttttagcatgatcaatatctttaacttgtaattcaattaagccatcatcaagtaaaatgtatgaacctacttgaacatcgttaattaagttttcatatgttactgagaacttttcaggtgttccttcaacttcattcatgctaacaataacttcgttaccacgttcaagttcaatgataccgtctttcatattatgcgtacgaatttctggacctttcgtatctaataaaattgctacaattttgtctaatcttttagctactttacgaattgtatcaattctacctttatgctcttcatgactaccatgtgaaaagtttaatcgtgcaacgttcataccagcattgattaatttctcaatcatttcttctgattctgaagctggtccaattgtacatacaattttagtttttctcattttataattcctcctgaaatcttatatagataacttgttagcaagttcatatagactataatcaaatttatgatctttaccatcaaaaatttcatcaaaagatgttgctacaattttattgttcttaattccaacacccttagctgtttcaccttgcattaataagtctaccgcatatccacctaaacgtgatgctaaaactctatccgcacctgttgggctaccaccacgttgaacgtgacctaacacagacactctattatcaacattgatgtattgtgataattctttttgacaatcttgcgcagtcatgcaaccttctgctacaagaacgattgagtgtttcttaccacgtttaataccttgttcaattttatcagctatttctttaatatctgttttcacttctggaactacaattgtctcagcaccaactgataatccagcccataatgctagatctccacaatcacggcccattgcttcaatgataaatgttcgtgcgtgacttgacgcagtatctctaattttgtcgactaatccaataatcgtatttaatgctgtgtcaaatccaattgtaaaatcagtaccattgatatcattgtcaatcgtaccaggaataccgatagtttgaatttctttacattcctcactgatgcgttgtgcaccgcgataactaccgtcaccaccaataactacaaggccctcaatccctcttttacgtaagttttcgattgcaactttacgtacttcttgctccttaaactctggacatcttgctgaatacaagaatgtacctccacgctgaatcgtatccccaactgatcctaattcaagtttatgaatatcatcatttaacaatccttggtaaccatgatacacaccataaacttcaatttcattgtaaattgctgtacgaacaactgctcttacggcagcattcattccaggtgaatctccaccactagttaaaactgcaattttcttcatgacgacatacctttctataactgatttatctttaactctaaattaccacaaattgatatgtcattccatcaaaactaatgtattgaattgatgtaaacgttttaaatattgaattttattttaacttaattaaaaaaagattagtagccacaattttgactactaatcttagttaaaattcagtatctaaatataaaattattgttctaatgtacttcaatttatggtaaaacccagtatcgatttaacataaaaatgctcaagttgattattctatataagaaccgatatttctgaatttttcaaaccgatcattagcaatttcatcacgtgataatgactcaagtgaatctaactgttcaacaaacgctgattttatagctaaagcttgctgttcaatatctttatgtgcaccgccaagtggttcagaaatgacatcatctataatacctaattgcttaatatcatgggcagtaattttcattgtttcagctgcaattttagccaaattactgtctttccataataatgccgctgcaccttcaggagatataacagagtaagtactattctctaacatcaatactttattggcaataccaatacctagggcacctccactgccaccttcaccaatgacaatcgcaataactggtacttttagtgaagccatctcaatcaaatttgttgcgatagattcactttgtccacgttcttcagcagctttaccaggatatgcaccttttgtatctataaatgtaaagataggacgattgaatttttcagcttgtttcattaaacgtaatgcttttcgataaccttctggatgcgccataccaaaattccgataaatattatcttttgtatcttttccacgttgttgtccaataaccgtaacagcacgaccatttaaaaagccaataccaccaatcattgctggatcatctctaaaattacgatcaccatgtagttccataaacgaatcaaagatatatggaatataatctagggtcgtaggtctttcttgcaaacgcgcaatttgcacacgatcccatggttttaaatttgtatatatttttttagtttctcgttccaatgacgcttcaagcatgtcaatttcttcttgtaaatccacatcatttttatcttgagactcttttaaagattcaattttatttcgaatttcaaaaagtggtttttcaaaatctaacattatttagtcacctcttgatggatttttagaatttcagacaatgtttgacgcatatcattacgatgtacaactttgtccaattgtccatgctctaataaaaattctgcagtttggaaatcatctggcaatttttcgtttattgtctgctctataactcgacgacctgcaaaacctatcaacgcttttggctcacttaaatttatatcaccaactgatgcaaaacttgcagatacaccaccagtagttggatgtgttaaatatgatatatataatagtccagcgtcagaatgacgttttaaagatacactggttttacccatttgcatcaaggaaataataccttcttgcatacgtgcaccaccacttgcagagaaaagaataaatggtaaacggttctcagtgcagtaatcaatgatgcgacatatcttttcaccgataaccgatcccatacttcccattctaaaacgtgaatccatgacagcaacgccaaatttcataccatctagttgcgctgtaccagtcactactgcttctttaagacctgtcttttgttggtccttttcaattttttctatataacttggaaaatctaatggattcgcagaggtcattcccttatcgaattctgtaaatgatccttcatcagaaattgcttctatacgtttatacgcagttaaagcaatatgatgatcacaattaaagcacacatttaaattttcagctaattcttttgtgtacataattttcttacactttggacacttagtcataatacctgcaggcacatcattatttttagagtcttgtactgtaagatatttctttttctttgttcgattaaaaaaatctttaaacataggaaaacctccaaataacctctgttctaaccatttagagccttaaactgaacttgaccagttaaaaacgggtttaaatttatttgatttatattcgtttgactgttgaatgtttatcataaactttcattttcatcattttaatgactctttattgctaacttttaagcaatttaattaaacgttaattatttttattgtaaatctgtaagtttcattgttttatcatacacatcttgcggattaacttcaatcctagctactccagattccattgccgctttagcaacattacgagcaactgatggcgccacacgtttatcaaacggtcctgggatacagtagtcttcatttaattcagaactatctattaaatcagcaatcgcttctacagctgcctttttcatttcttcatttatatgtgtagcttcaacctctaatgcacctctaaaaataccaggaaaagctaatacattattaatttggttaggatagtctgaacgtcctgtaccaacaactcgtgcacctgccgctttggcatcatcaggtattatttcaggatttggattagccattgcaaatataattggattatctgccatactcttaaccatatcttgtgacagcgcattagctacagaaactccaataaatacatctgcgtcttttacgacttcttctaaagacccttcaatcttatctttatttgtccatttagctacaacatctttcgtaggattcataccatatgaacgtccttcaaaaattgcgcctcttgagtcacacataaccatatttcttacaccatacgcgtatagtaatttaacaatggctattcctgctgcaccagcaccatttagtacaacttttattttagcaatatctttgttaacaactctcaatgcatttaccaaacctgccattgttacaattgctgtaccatgttgatcgtcatggaataccggaatattagtttcttttttcaatcgttcttcaatttcaaaacaacgtggtgccgaaatatcctctaaattaataccaccataattaggttctaacaacttaactgttttaatgatttcttcggtatcagttgtatttaacgcaataggcaccccattgataccagcgaagcttttgaataatgctgctttaccttccattacaggaatacttgcttcaggtccaatgttacctaaacctaataccgctgttccatcagtaataaccgcaactgtatttcctttaattgtgtaatcatacactttccttttatcttcataaatatctttacacggttcagcaacgccaggtgagtatgctaaacttaattcctctttattagtaacttttacatttggtttaacttctaatttaccttgattacgtttgtgcatttccaatgcttcatctcttaatgacatgaaatcagcccctaattcaatatttatttttaaaaaataacttggataaaacgcattacattataaaagtaaaaatattgggtaaatctgaatgagtaagaatttatgcttttgattatgtaacacaaatagcgataaacgataataaaataatatttttaaagatacattaaaccatactatctaaagatatacctttaattattataatggatagcaaaaaccaatatatcaaaaagttattattttttcgtacgatatatcgacaaaattctttactcaatttatgtatactgctttttgtgctaattattcttatggattaatcaataatgtaaagtgaaactcataaaaataataagcataaaaaactaatataaacgcaaactgatggttaaaaaatatctaaccatcagtttactatatcataatttattagttgataaaagttatataagcctaatatcactagggttaaaggattgtataaaattattaaacatactatctttttgattaatatatcctaaagtagtcatttgtttaatcgtttcatcataaaaggataacacaacatcattggcattttctttcgtagctttaatcatctcttcaaacgtatctatatgtgatttatttctaattataatttgtttggcaaatgctaatttttgttcttcaaaagtggctaatgtttgaatctcatttataattagttgacgttgttgctttctatggtcaaatttcccgctgactataaacaagtcattatgtgataacaactcttcgtactttttaaactgattagggaaaatcacaccatctaaagtttcgatgccatcatttaatgtgacgaatgccatattttgaccatttttagttcgaatttgtttaactttatcaaactgcactaatataggcttattattctgcgcgttactcaatttaaatatcgttaaatattgtttggcaacaaacattttatctactggatgttgtgaaacataaaatcctaaatattctttttcatactgactaataagtgcatcaggcaattcttctttatcttcatacatctgttttggcgttaaaatatcaaatagaaaaccatcttgttcaatgtttaaatcaccatccaacacttgatcaatagcttgtaacaacgttgaacgtgttttaccaaaagcatcaaatgctcccactaaaatcagtgcttcaagtaactttcttgttttgactcgcttcggtatacgtctagcaaaatcaaagaaatctttaaatttgccgttctgataacgttcatcaacaatcacttttacactttgataacctacacctttaattgtacctattgataaataaataccttcatgggaaggtttataaaaccaatgactttcgttaatgttcggtggcaatatagtgataccttgtttttttgcttcttctatcatttgagcagttttcttctcacttccaataacattacttaaaatatttgcgtaaaaataatttggataatggacttttaaaaagctcataatgtatgcaattttagaatagctgacagcatgtgctctaggaaaaccataatctgcaaatttcagaatcaaatcaaatatttgcttactaatgtcttcgtgataaccattttcctttgcaccttctataaaatgttgacgctcactttcaagaacagctctattttttttactcattgctcttcttaaaatatccgcttcaccataactgaagtttgcaaatgtgctcgctatttgcataatttgctcttgataaataataacaccgtaagtattttttaatataggttctaaatgtggatgtaaatattgaactttgcttggatcatgtcttcttgtaatgtaagttggaatttcttccattggacctggtctatacaaagaagttacagcaacaatatcttcaaagtgttccggctttaatttttttaatacacttcttacaccgtcagactctaattggaatatgccagtcgtatctccttgcgacaacaattcaaacactttttgatcatcgaacggaatcttttcgatatcaatattaatacctaaatcttttttgacttgtattaagatttgatgaataatcgataagtttctcaaccctagaaaatctatttttaataacccaattcgttcggcttcagtcattgtccattgcgttaataatcctgtatcccctttcgttaaaggggcatattcatataatggatggtcattaataataattcctgccgcatgtgtagatgtatgtcttggtaaaccttctaactttttacaaatactgaaccagcgttcatgtcgatggtttcgatgtacaaattttttaaaatcgtcaatttgatatgcttcatcaagtgtaattcctaatttatgtgggattaaacttgaaatttcatttaatgtaacttcatcaaaccccataattcgtccaacatctctagcaaccgctcttgcaagcagatgaccgaaagtcacaattccagatacatgtagctcgccatatttttcttggacgtactgaatgaccctttctcggcgtgtatcttcaaagtcaatatctatatcaggcattgttacacgttctgggtttaaaaaacgttcaaataatagattgaatttaataggatcaatcgttgtaatacctagtaaataactgaccagtgagccagctgaagaaccacgacctggacctaccatcacatcattcgttttcgcataatggattaaatcacttactattaagaaataatcttcaaaacccatattagtaataactttatactcatatttcaatcgctctaaatagacgtcataattaagttctaatttttttaattgtgtaactaagacacgccacaaatattttttagctgattcatcatttggtgtctgatattgaggaagtagagattgatgatattttaattctgcattacacttttgagctataacatcaacctgcgttaaatattcttggttaatatctaattgtttaatttccttttcagttaaaaaatgtgcaccaaaatcttcttgatcatgaattaagtctaattttgtattgtctctaatagctgctaatgcagaaatcgtatcggcatcttgacgtgtttggtaacaaacattttgaatccatacgtgctttataccctgaatcgaaatactaaggtggtccatatatgtgtcattatgggtttcaaacacttgtacaatatcacgatgttgatcaccgacttttttaaaaatgataatcatattgttagaaaatcgttttaataattcaaacgacacatgttctaatgcattcatttttatttccgatgatagttgatacaaatcttttaatccattattatcttttgctaaaacaacggtttcaatagtgtttaaaccgtttgtcacatatattgtcataccaaaaatcggtttaatgttatttgctatacatgcatcataaaatttaggaaaaccatacaatacattggtgtcagttatggcaagtgcatcaacattttcagacacagcaagtcttacggcatcttctatttttaagcttgaatttaacaaatcataagccgtatgaatatttaaatatgccaccatgattgaatggctcctttctattagttaagttttgtgcgtaaagctgtagcaagttgctcaaattcatcccagctgttcactgaaactcctgacgcattcggatgaccaccgccaccaaaatcttgcgcaatatcattaataatcaattgccctttagagcgtaagcgacatcttatttcactaccctcatcaactgcaaacacccatattttcaaacctttgatgtcagcaattgtattaacaaactgagatgcttcatttggctgaataccgaattgctccaatacatcttcagttattttaacttggcagaatccatcatccataagttcgaaatgttgtaaaacataaccttgaaacggcaacatttttggatccttctccatcattttatttaaaagcgcattatgatcaatatcatgcccaattaactttccagcaatttccatagtatgttctgaggtattgttaaaaaggaatcgcccagtatcaccgacgataccaaggtataaaacactcgcgatatctttattaacaattgcttcatcattaaaatgtgagattaaatcataaatgatttcacttgtagatgacgcgttcgtattaactaaattaatatcaccatactgatcaactgcaggatgatgatctattttaataagtttactacctgtactataacgttcatcgtcaattcgtggagcattggcagtatcacatacaattacaagcgcatcttgatatgttttatcatcaatgttatctaactctccaataaaacttaatgatgattccgcttcacccactgcaaatacttgcttttgcggaaatttctgctgaatatagtattttaaaccaagttgtgaaccatatgcatcaggatctggtctaacatgtctgtgtataataattgtatcgttatcttcgatacatttcataatttcattcaaagtactaatcattttcatactcccttttttagaaaagttgcttaatttaagcattagtctatatcaaaatatctaaatcataaaaattgttactaccatattaaactatttgcccgttttaattatttagatatatatttccatactatttagttcataacaagtataggacatcaatcaatattatattagcaacagttgaccaaataaaaaatacacatataacaagctttttaattccgggtccccaacatagaaggtgacgtaatgtcagcttactataatgtgcaagttggggtgggaccccaacacaaagaatttcgaaaagaaattctacaaacaatgcaagttggggtggggctccaacatttgtgtgaaatctatcttatgcctattttctctactaagttcctatacttcgtcaaacatttggcatatcacgagagcgctcgctactttgtcgttttgactatgcatgttcacttctattttggcgaagtttcttccgacgtctagtatgccaaagcgcactgttatatgtgattcaataggtactgttttaatatacacgatatttaaattctctatcatgacattaccttttttaaatttacgcatttcatattgtattgtttcttctataatacttacaaatgccgctttacttactgttccgtagtgattgattaacagaggtgaaacttctactgtaattccatcttgattcattgttatatatttggcgatttgatcgttaattgtttcacccatttgaggctgtcttcctaaaagttgcatagactttaaaacatcttgtctattaatcacacccactgtctttttattactcgaaacgacaggaatcaattcaataccttcccaaatcatcatatgcgcacaacttgctactgtactcatagcatttacataaataggatttcgcgtcattactttatctatttcgtcgtcgtcctttgtattaatcatctctcgacttgttacaatacctactaatttataagactcattgactaccggaaatcttgtatgaccagttcgattcgccatacgcttataatctgctattttcatcgtatcaaacagtacagataaatcatctaatggcgtcattatatcttgaactattaagatatcttttcgtattttctgattaaaaagtgctttgttgataatatttgcaactaggaatgtatcataacttgatgatagaacaggtaaatcatgttcattcgcaaaattaataactttattagatggcttaaatccaccagtaattaatatagccgtgcctctttttaaagcttcaatctgcacatcttcgcgatttccgacaatcaataatgtctttggaccaatatactttaaaatatctttgagttccattgctccaattgcaaatttagataccatcttagtaatacctttgttgccacctaacacttggccatcaataatattgacaatttcattaaaagttaaatgttcaatttcattacgattacgtttttcgattcgaaccgtaccaacacgatctatcgttgcgaccatgcccattttatcagcatctttaattgcacgatatgctgtcccttcagatacgtttaaaaatttagcgattttacgcaccgaaattttagagcctatagataacgattcaatataatctaaaatttgttcatgttttgtcattctttacctcttcttttcgaacagtattaactacattataactttattttggataaaaagcattgaagtgaaatgaaataatgatcgtttcacctattttattttttgaaaatatacaacaaacacaaagatcacaaaatctttaattttaaatggaaaaatccattattatttattagaatgtaagtgaggagggatgtactaatgtataaaaatatattacttggtgtagacactcagttaaaaaaatgaaaaagcactaaaagaagtgtctaaattagctggcgaaggtacagtcgtaacaattttaaacgcaatcagcgaacaagatgctcaagcatcaattaaagcaggtgttcatttaaacaaacttactgaagaacgaagcaagcgattggaaaaaacacgcaaagctttagaagattatggtattgattatgaccaaataattgttcgtggtaatgcaaaagaagaactattaaaacatgctaatagcggtaaatacgaaattgttgttttaagtaaccgtaaagcagaagacaaaaagaaatttgtacttggaagtgtcagccacaaagtagcaaaacgtgcgactatccctgtattaatcgttaaataaaatttttatccagaatcacaaataatctttcaatcaagatgcagtctcaaacgactgagtaaacacaagaaatgattatgactgtggttctggattttttatattattcactatttaaccaacaacttgtatcaaacaaaaccattacgaaccaaaaacataatcaatatcataacccagaaagagttgactatggggccccaacacagaagctgacggaaaagtcagcttacaagatcagtagaatataaaaacactcactaaaaatatgcggacgataacttccacatagattagcgaggtgttttttagtgtaaaatctatattctatttaaaactgaacagattcacctggttttaaaatttgcacgtcccctacattaacagcatctttaaattgttgtggatcttgttcgattaatgggaatgtatcataatgaatcggtacagaaatttttggtttaataaattcattaatagcataacttgcatcatcaatacccatcgtaaaattatctccaattggtacaaaacatacatcaactggatgacgtttcgcaataagtgacatgtcactaaacagacctgtatcaccagtatgataaattgtttttccttcaacttcaaacacgatacccattggcatacctaaataaactggaataccattttcatgtgtaaaacttgaactatgaaatgcttgaacaaatttaacgcttccgaaatcaaagtttgctttaccaccaatattcataccatgaacattttcaacaccgtgatatgaagaaagatagtcagccatttctgcacttccaattactgttgctcctgttttctttgctagttccacaacatcaccaaagtgatcaaaatgaccgtgcgttaaaacgatatagtctacctgcactgtttcaatattcaaatcacacttagggttatttgatataaacggatctacgataacctttttgttgttcccttctaaataaatcgttgattgaccatgaaatgataacttcatttgagcatcctcctatcaattgctatataaatttagtacccttttgccacttaattataacaaattctcaaattttaaaaattgaaaatctagttaatgtattagctcgattttgaaatctaataataattggcataaaatgtaagtaatattatgttgaggagtgtttataaaatgacaaaaatatcaaaaataatagacgaactgaacaatcaacaagctgatgcagcatggattacaacaccgttgaatgtatattattttactggataccgtagcgaaccccatgaaagattatttgcattattgattaagaaagatggtaaacaagtactattttgtccaaaaatggaagtcgaagaagtcaaagcatcacctttcacaggtgaaatcgttggatatttagacactgaaaatcctttttcactttatcctcaaacaatcaataaattactaattgaaagcgagcacttaacagtagcacgccaaaaacaattaatctctggtttcaatgtcaattcattcggagatgttgatttaacaatcaaacaattgagaaatattaaatccgaagatgaaattagcaaaatacgtaaagctgctgagttagcagataagtgtatcgaaataggtgtttcttatttaaaagaaggtgtgactgaacgtgaagtagtcaaccatattgagcaaactatcaaacaatatggcgtcaatgaaatgagttttgatacgatggttttatttggagatcatgccgcatcaccccatggcacaccaggagatcgcagattaaaaagcaatgaatatgtactatttgatttaggtgtaatttatgagcattattgtagcgatatgacacgtaccattaaatttggtgaacctaacaaagaagcacaagaaatttataatattgtattagaagcagaaacatctgcaatccaagcaattaaacctggaatacctttaaaagatatcgatcatatcgctagaaatattatttcagaaaaaggttatggtgaatatttccctcatcgcttaggtcatggtctaggattgcaggaacatgaatatcaagatgtttcaagtactaattctaatttgttagaagctggcatggttattacaatcgaaccaggtatttatgtacctggtgttgcaggtgtaagaattgaagatgacatacttgtcactaatgaaggatttgaagtattaacacattacgaaaaataaggagtgggacaaaaatgaaaaccttgttacaagcgcattttcatttttgtcaaacactgccaatataacattgtagcgcctcgaacataaatttttgcccaagtctaaatgcaatatgtaacaaacaagctagaaacacatatgcaggtatgttcatcagtaacatgtaatgaatcaaatcaatatcattcatgtttgatgatttcctcgcattgtttctagctttaatttatcattatttaattttaataaccaaggagatgataacgtcattctttagtacgctgtaatccattcccttttcattaaattcaaattataattgtaatgcttcttctacagatttatattccatttcaaatgcctctgcaacgcctttattggttacgtgacctttgtaagtatttaaacctaatgataatggttgatttgatttaaatgcttctctataccctttattagctagcatgagcgcataaggtagcgtagcattatttaaagctaacgtcgaagtacgcggtactgcacctggcatatttgcaaccgcataatgaaccacaccatgcttaatatatgtaggatcatcatgtgtcgtaattttatcagttgtttcaaaaataccgccttgatcaatagcaatgtcaataataactgacccatttttcatttgtttaatcatgtcttctgttacaagtcttggcgctttagcacctggaattaaaactgcacctatcactaaatcactttgtttaacatacaactcaatattcaacggatttgacataattgtatgtacacgtccaccgaataaatcatctaattgttgtaaacgctttggattaacatctaaaatcgtaacatctgcacctagtcctagtgcaattttagctgcatttgttcctgcttgaccaccaccgataatagttactttacctttaggtactcctggaacgccacctagtagaattcccataccaccattaagtttttgtaggaactctgcgccaacttgagctgacattcttcctgctacctcactcattggtgataacaatggtaaagatcggtctggtaactgcacagtctcatatgcaatactaattacttttctatctatcaaagcttgtgttaatttttcttcatttgctaaatgaagataagtgaataatacaagcccttctttaaaatatggatattctgattcaagtggttctttaactttaataaccatatccacatcccaaacttttgcttgttcagcaacaatctcagcacctgcttctttgtaatctacatcttcaaagaacgatcctgaacccgcatttgtttccactaaaacagtatgcccactttctactaaagcgtgcacaccacttggtgataaaccaacacgattttcattatttttaatctcccttggtataccaattttcataccatccacctccataatcatcttaacgcgaacattttgaaagcgcaatcaaaaatccacaaaattgtaaaggttattacactgacttttccgaaaattgtggtaaaatataattaagaaagaacaaggaggcacttactatgattacttacaaaaatattttaatcgcagttgacggttcacatgaagcggaatgggcatttaacagagcagttggtgttgctaaacgtaacgatgcgaagttaacaattgtgaatgtaattgattcaagaacatattcttcttatgaagtttatgatgctcaatttactgaaaaatctaagcattttgcagaagaattattaaatggttataaagaagtagctactaacgctggtgttaaagatgtagaaacgcgtctagagtttggctctcctaaatctatcattcctaaaaagcttgcacatgaaattaatgcagacttgattatgagtggtacatcaggcttaaatgccgtggaaagatttattgttggttctgtatcagaatctatcgttcgtcatgcaccatgtgacgtgttagttgttcgtactgaagagttaccagcagacttccaaccacaagttgcaacaactcaattacgtgaaaaatatcaaaattaaatatagatgatcattagataactacttgatcattatgaaccaagtgcaactgtctgcacttggttttttattgtttataaataaaattcatttaataatgttttcataatcttcttcgactacttaattttttaagatattcgtgaaaagagacattacactagttaattttcaaacaatacaaaaagcgtctacctcctacatataattgtagcggagatagacgcttaatatttattaaaaaattattttaaaccaccgaatgtcataacatcacgggcaatcatgctttcttcatctgttggaataacgacaactttaactggtgaatgaggatagttaataaatccttctttaccacgtagtaagttttcatttttcttaggatcccagtaaacacccataaattctaagccttcaagaactttcgcacgaatttctactgagttttcaccgatacctgctgtaaatacgataacatcaacaccatgcattctcgcagcatatgatccaatatatttgtgaattttagaagcaaatacatctaaagccatttgtgaacgtgctttacctgattcagcttcttctgataagtcacgtaaatcactagatgtacctgataatcctaataaacctgactctttgtttaagatttccaatacttgttcagcagttttaccagttttttccataataaatggaattaaagcagggtcaatattaccagaacgagtacccattgttacaccagcaagtggtgtgaagcccattgatgtatcaatagatttaccgccatcgatagctgcaattgatgctccattaccaatgtgacatgaaataatacgtaaatcttcaattggcttatctaacatttctgccgctctttgtgatacaaatttatggcttgtaccatggaaaccatacttacgaatgccataatctttataataatgatatggcaagctatatagatatgctttttcaggcattgtttgatggaatgctgtatcaaaaattgccacatgagggatatttggtaataatttacggaaagcacgaatacccatcaagttagctgggttgtgaagcggtgctaattcacttaattcttcaatttccttttcaacctcatcagtaatagctactgattcagggaatttttcaccaccatgtacaacacggtgacctgttccatcgatatcgttaatatcattaataatattgtgcgctttaaaagcatccaacatgatatcaactgcctcaacgtgatccttgatatcttgtactgttttaactttttccccgttgacttcaattgtaaaaattgaatccttcaatccgattctttctactaaaccttttgttactaattcctcttcaggcattctaattaattgaaattttaatgatgaactaccagcattgatagccaagattaattttgacataagtaatgatcctccatcgtttgctttttatactatttcatttctcattttatcattcatacagttttatgactatactattacagattattttttaggacgatttgtgtccatccactgatttaactctgtcataaatccttgaaattgtgaaggatttttgaaatcaggaatatttgccaataatacttcaactggctttgtttcacccgattttttcttttgtaaaattaatatagattttcgtgctttttcatttttaaataaagttggtggtaaatttaaaaatgcttgcatctctgtctctgttgcaatatatttttcaagctgttttacatgttcgcctgtaaaaatattactcggtaccactagaaaggcatatccagcatcttttaatgcatttatagcttgttctattaataaataatgtgaataactatgtccttcttcgaaacctaacttaaactccttacttctttcatcaattggataatagcctactggaaaatcaccaataacgatatctgcttcttctaacggtagtggcataatggcatcttgaggatacacatcgaaaggaatttctaagaagtttgctaaatgtacactaacacgtgataaaactggatcaacttcaattaaatgatgcataaccgcaatttcaggtaacacttcttttacagtagcacttaaatgacccgcaccacttgcaatatcaacaatatgtaattcttcttggttgttcataaaacgctcaactaaaaatcctagtatcaagccaattgaatctggtgtaatttgatgatttgcttgtatcttttcttcctgcatcaaacttaaatatgcaaattggaatgctttacgtcgatcttgtaacgtcgattgttctaacaatcctctttcatttgtataaacttgttccattgctagcccaagattttcaataaaactttgtccattttcattatttaatgttttagctttttcatctaatgtatgaaacaagcgttccataattgtttgttgttctgccatattcgtccctctccaataaaaagtgcccataggtcttagcaatcatagaaaacaattctattttaatgctgttgacaacgatggacacgatgtatacattttaagatttatctctttaatgattaaatatttttgtatgcagctaaagcagcatcaaaatctgggaaatcagtaccttcactaacgatttctttataaacaactttattatctgcatctaatacaaatactgcacgagctaataagcgaagttcttccataacaacgccatagttttcgccaaatgataagtcacggtggtcacttaatgtaatgacattgtctaaacctgctgaagcgcaccatcttttttgtgcgaatggtaagtctgctgagattgtaagcacaatcccctcttctttagaagcttcaaagttgaatttgcgagtctgctgatcacaaacacctgtatcaattgatggtaccacactaattaatttctttttaccagcataatctgctaatgttacttgatttaagtcattatctaacactgtaaaatcaggtgcaaaatcaccttcattaatttgttgaccttttaagtggattggtccacctttgaatgttatttcagtcatatacttgacctcctgcattttaaaattctaactacatcatacgacaatttatggtttgattacaattttcatgctttaatcaaaagcaaatttaattttatacaaattgttgaatataatcaaaagcattttttaaaattaaaatcgcagtaataataataaataatacttttacatagccaacaccttgtttgatagcaaaatgagccccagtatatgacccagcaatcatgcttgtagccataattaaacctattacataatctacttgtcctaataccataaataatacaagcgcacctatattagaagcaaagttcaaaactttagcatttcctgcagcacttaaaaaatcaaaaccaaagactaacaatacaaaaagcataaatgaacctgttcccccacctacaaatccatcataaaagccgattaatataaaaagtgctgcaaatagtatggctttcttaaatgtaaattgagtaaacgtacgtgtattgccccaatcttttttaagtaatgtgaatataaacaccgacgaaagtgcaataatgattaaaggtttcaatatttgtgacggaaccatcgttgcaatatatgctccacatgcagatgccaaaaatacaaaaccaaataatttggcaacaacatataagtccactttaccggaccttataaactttatcgtactagttaaagaaccaaatgaacttgccaatttatttgtacctaaagccacagatggtggtagaccgattgctaataatactggcgtagaaattaaaccgccaccccctacaaccgaatctataaacgccgcgataaaaccaaataaaattatgattataatcatcgttaagttcaaatccatagtttaacatccccttatgtttaaatttactctaggattttatttataaaaagtcgtttattaattggtttgtttgctgttctttaatagttttataatcactagttatttcaagtgtttcaatattttcaacagcacgattaatcatctcttcaaaatcaaagacactttcatattgaactaccttatcaaagtttggttcggttactggatttttaggggtgaaaattgtacaacaatcttcaaatggttgaatagatgtttcaaatgtaccaatttctttcgatttaataataatttcttctttatcgtaagttaataaaggacgtaatacaggggtagacgtcacattattaattgcatacatgctatgaagtgtttgactagctacctgccctaggttttcaccatttacaatagctaaagcccctatttgatgtactaatttatcagcaacacgcatcatcatacgtctcgttgaagtcattgtatatcttggatgtacaactttatttacctgtttttgcaattctgtaaatggtacaatatgcaatttaattggtccaacacgttcagctaaaatacgtgtcaattcaataactttttcttttgcttgatcacttgtaaatggtggactatggaaatgaatcgcttcaattgttacgccacgtctcatcacttccatcccagcaactggtgagtctatgcctcctgaaagcattagcaacgttttaccacctgtacctactggtaaaccaccagcaccagctaccacttcttcatacatataaattgcatctaatctaacttctactctaatttcatgatctggtcgtttaacattcactgaaacattttcaatttgtttcaatacggtaccacccaattcacgttgtaattcatacgtatccattgggaaatttttatcggcacgcttcacatcaattttaaatgtgctgttttcttcaaattgctgcgcaaatttaattgccgctgcactcattgcctctaatgttttttctacttttaatactggactaattgatttaataccaaagatttttgataatcgatatgttatttcatttatatctgcatggtcttcaagttcaatatacatacgatctcgtttgcctttaacgacaaacccatcaagcccttttaatgacttatttacattatttcttaattgatttacaaatttctttctatttgaaccctttaatgttaactccccgtatctaacaagcaagtgatcatacttcattattttagcaactccttaatttcctcataaatgatgataaatatttctttaaaccttgctatatcttctttagttgtagtagccccaaatgataatcttatactaccttcaatagacttgtctgataatcccattgcagccaatacttcatttaatttattacgtttagatgaacaagcactcgtcgtagatatcataatgtcatattttgaaaaagcattaactaatacttcaccttttacgccaggaaaactaatatttaaaacgaatggtgaacctgaagttgaagaattaatataaactccatgatacttatttaaaaattgacggacgtcattatttaactcagtaacaaatgcattcaatgcttcaaggttttcattagctatcttcatcgctttaaccattgcaatatcatttggcaaattaactgttccacttctaacgccatattcttgaccaccaccatggacagttggttcaacattttgaatatgattaacaagtaagacgccttgaccttttaacccattaaatttgtggccacttaaactcacgctatctacatttgttaaatccatagctactttaccaaacgcttgaaccgcatctacatgaaaatgtgctttaggataattttttaacgtttcagccatctttggaatgggttgaatttgacctgtcacattatttacatacatacatgttactaaaccgactttatcggacattaaatcgttaaaatgttgcaaatcaatcgtgccatcttttgttacatcaacatatttaactataaagccttcgcgctcttccaaatatctgacaacttctaaaacagacggatgttctaaaacagatgtaattatttctcttgctgtatcaaatttacgataagccacacctttaagcgcgatattgttagattccgttgcaccactagtgaatacaacatcataatttgtttttgaattaatcattgcattaatttgagcttttgcttgttgtagtaattgatttgcctgcaaaccagctttatgcggactattcggattataatacattgattgatttacttttaaataagtatctaacacttcttcaaatgctttcgtcgttgccgcattatctagatatatcaaaataaacacttctctttcattaatcatcaatcttttaaaattgtttttactcaagcattatactattatcacataaaaaataaaggctatagcagaaattaatcatttttccacccattttaatatgaattgaactatttcactcaatacatagaacgatgcattttcactacctacattaattcaacgatcacattgaatgacatttatctttaaacgattgctaaattgattctccctatcatatatccatataaaaaaagaagctagacaacatacagttggctaactcctatcacttcgtaaaatacgattaagtttaataaatgctattgcttaataacttcttcttcaatatgtttagtgacacctggctcaacactttcaagagcttgctctgcaatttcaatcgcacgcttatagcgattatttttaaataatcgttcagcttcatttaagctcttatcaacattgctatagtccttacgatatctatttccatattgaattaatttctctgcataaacagcattaacaagaacatcatttgcttcatcttcaaatgtattcatttgaatcacaattttagacactttatcttttaactgtttaacgtgtattggacgttcactaaattgttcgttaacatcacgaacttcatgatcaatttcatttttcatgatgataaatctttcaggaacacttgttaagttagaagcaagtaatcgacgatacacttcttctttcttcgattgtactcgtaacagattgtcttctgcttctgcttcatcttcacgtaattgaatcagatgattttgtagcttttcttgtttgtcattaatgactgtgacatgatcttctaaatattgtaaattatcctgaacctcgctatatcgtacagcagatttagacatttcttttaaaatatcatcatatacagaaattaaactttgaatttcattttcaaattgacgaacactttgagcatcagattcatttatatagtagttttcacgtacatattcaatttctgtttgcaatgtataattcatgtctttagctttgaataagttatccgtaatgatatcttttgtttcttcgacatcatttttagctttaacttcatgttcaattaaatcatacatgtcatctaacttatcattgatattagctagcttatcattagcttcttctaattctaagcggctaattaatggctcaacgaaactaagctctgtttttaagctttgtaatgtactgtctacttttacgtgatcaagatcatacccttcaactttaagatcacggcaaccatattttaaatcttggaattgaccaggtaattctttttgagtttctctaattaattctggtatttcttccatataagatcttagctgtttcatttgttcattcaaggcagctatatggttgtgcgcttgtacataattaccatcagcttttagtacttcatattgctctaaccttggctcgaatttttcaatttcagtttcaagaagacttgctgcctcaccaaattgatgacgatttgctaaaacatcacgtttcatttcacgataatcaaccttacatttgtcatataattcatcattatctttgtataacgcaataatttcatttacatcttctaattgttgctgatagctttgttcataactatccatcaactcatttgcatcatcaatttcactttgagatgcgttgaaactaaatttatctaataaagcctcagcattatggattttttcttccacaggagctagatacttatttgtactttctacgttgtcctttttcattgcatcgtatttcgtttttgtttcaccttttaaattcaacttagataattgtgcaaggttttgatcaaaaggtaacgtctcaatttcatttttacgttcgattgctttttcaataatttgtcgtttatttgaacgtaaatagaataatacacctacagcaatcaatataatcacaattattgccaaaatgatatataacaccatatgcttctcctcctaatttatcattactattataacgtaattttgcttaaggataaattataaaatgaatttattgccataatattttcgaaattctatactattataaaatctatgaaaataagaggttttaaatatgacaacaattaacccaacaaactacacattattaaagaaacaagcagcaagccttattgaaggtgaacatcacatgattgctattttaagtaacatgtctgcattattaaatgataatctagatcaaattaattgggtcggcttttacttattggaacaaaatgaacttatacttggacctttccaaggacacccagcttgtgtccacattccaattggaaaaggtgtatgtggtacagccgtttcagaacgtcgtacacaagttgtagctgatgttcatcaattcgaaggacatatcgcttgtgatgctaatagtaagtctgaaattgtcgttccaattttcaaagatgataaaattatcggtgtcttagatatcgatgcccctataagggatcgatttgatgacaatgacaaggaacatcttgaagcaattgttaaaattattgaaaagcaactcgcataaaaggacatcagcattttcaataaagtgttgacagttagcaggaaaatgttacaataaattttgtgtgaattaacgaaagtagcagttgtatattattgagcgctatgttgttcccaatgcggacgtgtcacgtaactgtcgctataaggtgaagacacataaaacaatatatcttagtaagcatgcaacactcttttttgtttattcataacaacaaaaaagaattaaaggaggagtcttattatggctcgattcagaggttcaaactggaaaaaatctcgtcgtttaggtatctctttaagcggtactggtaaagaattagaaaaacgtccttacgcaccaggacaacatggtccaaaccaacgtaaaaaattatcagaatatggtttacaattacgtgaaaaacaaaaattacgttacttatatggaatgactgaaagacaattccgtaacacatttgacatcgctggtaaaaaattcggtgtacacggtgaaaacttcatgatcttattagcaagtcgattagacgctgttgtttattcattaggtttagctcgtactcgtcgtcaagcacgtcaattagttaaccacggtcatatcttagtagatggtaaacgtgttgatattccatcttattctgttaaacctggtcaaacaatttcagttcgtgaaaaatctcaaaaattaaacatcatcgttgaatcagttgaaatcaacaatttcgtacctgagtacttaaactttgatgctgacagcttaactggtactttcgtacgtttaccagaacgtagcgaattacctgctgaaattaacgaacaattaatcgttgagtattactcaagataataccgttcaatacaaacacccacaattgtgggtgtttttttattaatttaaaaatgatagattcaagattatatggagctaccctattttacaatcaacttagaatttacaagtcttatttgttgaattatctatagtatttcatcattactttttaaaattatcaattgcgatatacgaatcctcatccctctatcaaataacctttcatcgtctcacttaataaataatttcggattatctgtaattaatccatctacacccatttgtcttaatttttctccagttttcaatttattaactgtgtatggcataacttgtaattgatgatgatgtgcttcatcaacaaattttctggtcactaatgcataattaggattaacataactagcaatttgagcaattcttgaaaagtttggctttttataccaatacttacgtttactacaaagcacacctaattcatatatactgcctaatgtgtttaacttttcaatgcattcgatatcaaaagattgtataactacttgtgtcgcatcgactttcttttcttccaaaaatgccagcaatttacattctattcctggatataaattcggacttttcaattcgatcaatagctttttatcaaactttaagcataatgaaagtacttcatctaacgtgggtattcgttctcccttaaaagcaacatctttataaataccaaaatcaaatgattttaattgcgataatgtgtaatcagcaatacgccccttaccatccgatgttctatcaattgtttcatcatgtatcacaacaaaatgttggtctttggtcaaatgaacatctatttctaacatagcaacattgagccccattacctctcgataaccgaccattgtattttcaggaaaatcactcggcaatccacggtgcgaaacaatttgtaattcatctttcagtttattcagagtcattgataagtcacctttctgttaaactttgataaactattctaaaattaaactatcacaattatattggaggttaaagcaattgcatcaacatgactttaaagtccaaacttcttggcaaggtggtcgtaacaatgtcggaaacgttcgaggcgacatactttcagagaatatttcaatacctgcttctttaggtggtgttggtataggaacaaatcccgatgaaatgttagtatcagccgcttcatcatgttatatcatctcattagcagctactcttgaacgtgcaaagttcacagatatttcaattgaacaacaatcgattggaacagcttgtttaaataatggaaaattcagtatgtcaaaaattgtgcaccatcctcacattgaaattccaagtgatcaaatagcacaattagaaaagcgattaccaaaattgataacaattgcagataataattgcatgatttcaaatgctgtaagaaataatgtggacataaaaatctatcccatcattcaggccaaataaaatcgttaagtgataacatttgttcgacaatatagtgttatcactatttttaggcttttaaattttcagaaaatttgctaaaatagtgaaatcttatttataggaggcatataaatgtattatcatcaaccgttgttattaacacctggcccaacccctgtacctgatgccattatgagagaaattcaagcacctatggttggtcatcgttctaaagattttgaagacatcgcacaacaagcatttcaaggtctaaagccaatatttgggagtcaaaatgatgtacttattttaacatctagcggtacaagcgtcttagaagctagtatgctgaacattgtaaaccctgaagatcacttcgttgtcattgtttcaggtgcctttggtaaccgatttaaacaaattgcacaaacttattacaaaaatgtgcacatttatgacgtaacatggggagaagctgtagatgtcaaagatttcatcaatttcctttcaactttaaatgttgaagttaaagcagtatttagtcaatattgcgaaacatctacgacagtgctacaccctattcacgagttaggaaatgccatcaatcaatttaatagtaatatttattttgtagttgacggcgtaagttgcattggtgctgttgatgttgacattaacaaagataaaattgatgtacttgtttctggtagtcaaaaagcaattatgttacctccaggattagcttttgtagcttatagccaccgtgcaaaagaacgtttcaaagaagtaactacaccaaaattttatctagacttaaataaatacatttcgtcacaagctgacaattctacaccgttcacaccaaatgtgtctttatttagaggtgtaaatgcatacgttgaaaccgtaaaagcagaaggtttcaatcacgtaatagcacgacactacgcaattagaaatgcattaagaagcgccttaaaagcattagatttaactttattagtcaatgataaagatgcatctccaacggttacggcattcaaacctaacacaaatgatgaagtgaaaataatcaaagatgaacttaaaaatcgctttaaaataacaattgctggtggtcaaggccatcttaaaggtcaaattttaagaattggtcatatggggaaaattagtcctttcgatattttatcggtagtatctgctttagaaattattttaactgaacaccgtaaagttaactatatcggtaaaggtatatcaaaatatatggaggttattcatgaagcaatttaatgtactcgttgcagatcctatatcaaaagatggtatcaaagcattattagatcacgaacaattcaatgtagatattcaaactggcttgtccgaagaagcattaatcaaaattataccttcataccatgctttaatcgttcgtagtcaaactacggttactgaaaatatcataaatgctgctgattctttaaaagtaatcgcacgcgccggtgttggtgtagataatattaatattgatgctgcaacattaaaaggtattttagttattaatgccccagatggtaatacgatttcagctactgaacattcactagcaatgttattatcaatggctcgaaatattccgcaagcacaccaatcacttacaaataaagaatggaatcgaaatgcatttaaaggtactgagctttatcataaaacattaggtgtcattggtgctggtagaattggtttaggtgttgctaaacgtgcgcaaagtttcggaatgaaaatactagcttttgacccttacttaacggatgaaaaagcaaaatctttaagcattacgaaggcaacagttgatgagattgcccaacattctgatttcgttacattgcatacaccactaacacctaaaacaaaaggcttaattaatgctgacttttttgccaaagcaaaacctagtttgcaaataatcaatgtggcacgtggtggtattattgatgaaaaggcgctaataaaagcattagacgaaggacaaattagtcgggcagctatcgatgtgtttgaacatgaacctgcaactgattcgcctcttgttgcacatgataaaattattgttacacctcatttgggtgcttcaacagtcgaagctcaagaaaaagtggcaatttctgtttcaaatgaaatcatcgaaattttaattgatggtactgtaacgcatgcagtgaatgcacctaaaatggacttaagcaatatagatgatactgtaaaatcattcatcaatttaagccaaacagttggtgaattagctattcaattaatgtacaatgcaccaagctctattaaaattacgtacggtggcgacttagcctctattgatagtagtttattaacacgtacaattattactcatattttaaaagatgatcttggtcctgaagtcaatattatcaatgctctaatgctgttaaatcaacaacaagtgacattaaatattgaaaataataaagcagagacaggttttagtaactacttagaggtagaactatcaaacgatagcgattccgttaaagttggcgcttctgtctttacaggtttcggtccaagaattgttagaattaataatttttctgtagacttaaagccaaatcaatatcaaattgtgtcatatcataatgatactccaggtatggtaggtaaaactggcgcattgttaggtaaatacaatatcaacattgcatctatgactttaggtagaactgaagcgggcggagatgcactaatgattttatccgttgatcaacctgtttcaaacaatataattgatgaacttaaacaagttggtgaatacaatcaaattttcacaactgaattgacggtacagtcataaacaatttatgtaaattcaaaatgccaagaagacattggattacttccattgcttcttggcattttttcattattaatttcattgtacctcaatatgaaacctttgtttcaatctttcacttcaagttatgctgtcaaacaacaatcaaattacaaattatctagtacacctctaagttcacctaaatgattaataacatagtcggcatgatgcgcttctaactcacttgcagcatccttaccttttaaacctgttaatgttccaataaacgttgcacctattttttgagcacttaataagtcagctaacgaatcgcctactataaatacgtcatctttatttacaatgttatcttgcttattgatataagattcatatttatcgcgattattaccatataaagctgcgatataactaaaaggattcggctttcctaatggtcgtgcttgcggatacatattctctgcttctaaaacatcacttgctgttgcaataaaatcagcttcaaaatatggtaacaatcctaaattttcaaatggcacaacagtctcagtataaggacgacctgttgcaatacctaattcgaaaccagcaccttttaaatcattcagaagtaccttaacttcatctaccggtctcaaaataatttcttgataaatataacctgtcttaaaagtagttcgtgctattttcttttcaacctcttcatacaacttcgatcctaaataccattcttgataaacttcttgcgctaacgtccataatgcacccttcaaactaaataaagtagcatccgaaacatgtaactctgttattgcaaactcttccaaagcagcataaatattatttttaccaacttttacattatccaaaaattgtaaaggtagttgttcatttaaattaaaacggtctgctaagtttgtgcttatattttgcaacttcaatttgacaggctcatcttgatatatgaatgcctcaatttcatcatgtgataactttttcaaaatatcaattaaatgaatactaaaaacgataaataacatatcccaatttgaattcagccctagcgattttaatttgtttaaaatcttatctttttgaaaaattcgattcctaatgtcttgtatatcgttatcagtcaaagtttcccaatctatatgtgaatgaagacctaaataacacttatccattaataattcatataccgttaatgcagagacatcgaaacaacgttcttcacttaaaaaaacgccatcaacatcaaataaaattttcttcacaatccccactccatttctgaaaattcagatataaatcattctactatttgactaaaaaaagcgcaaaccctattgaagttagatttgcgctttagctatttaaattttataaatgtttttcaatttcatcagcaatctgctgtacgtgtgtaccgacaataacttgagttgaatgtttaccattaacagtaacaccaactgcaccggcgtttttaatcttctgttgatcaataatagatgtgtcttttaactctagacgcaaccttgttgcacaattagttaaattaacaatattctcttgaccacctaaaccttctaatatttgtatagcatgattatgatatttactttgtttaatatcattttcaccaggagcaatattatcttttacaactgttggatcaactaattcattttcacctctaccaatcgtatttaagttaaatacttggattactacacggaaaatcacatagtataagatgaagaatacaacaccttgaacaagcaacatcaatggatgatttgataccggattaattagtgataacacataatctatcaaacctgcactaaatgaaaatccagctgtccaatggaatgtagctgcgataaataaagataatcctgttaataacgcatgaacaacatataagattggcgcaacaaacataaatgcaaactcaatcggctctgtaacaccaacgaaaaatgctgcaactgaactcgctaggaaccaaccgtaaacttgttttttctgagtagttttagctgtatgatacattgctaacgcagccgctggaataccgaacatcatgattgggaagaatcccgcttgatagcgtcctgtaataccttttatagcatctttgccactttggaatttaccaatatcattaataccaatcgtatcaaaccagaacacactattcagtgcatgatgtaatcctgtaggaattaataatctgttggcaacaccatatacgaaagcaccaaatgatcctaaaccaactatagattcaccaaattttacaatccatgaataaagtagtggccataagaataacaatatgacaactaaaaatgtacagtaaaatgcagtcataattggaactagacgtttaccactaaaaaatgataatgctaatggtaattctgtttcactaaacttattgtatgcataagctgctattaaacctattacaatacctacaaagacattgccattattcatcttttcaaaagctgaattaatttccgaagctttcattcctaataaaggcgctaatttcattggtgataatacaactgtaactaaaaaatatcctagcgcagctgcaagcgcgactgcaccatcatttttctttgccattcctattgctacaccaattgcaaataaaatacctaattgctctaaaatcgtagtacctaccgtagtaaagaacattgcgattttcggcgccgcatgaagtgcatttaacgtattaccaattccggcaataattgctgcagccggtaaaatggcaactggtaacattaacgaacgccctaaattttggaaaaatttatacattgaatgtcatccttcttaaaataaggtagaaatataaagattactaatgtaactagaataactacttcgatactccgttatagtcacctaggcttactaaccagctatatttctacctcaagttattttataaactttttacaatttcatgcaattcttgttgtaactttgctgttcgtgtttcaatctcttttgtaatataatcgatacgctcgtttcgttttaaatctttaggtaaatcgttaatatcgattggtttaccaatatttatgtatgcttgtcctgttaaaagaccgtgaatcttagtaggaccaacataagcaacaggtaatattggtgacttacttaacatggcaattgttgaagcaccacgtttcaaaggtgcaccttcttgcgatgtgcgagaacctgttgggaagataccaactgtcttattatctttcaacaaattgattggacgttttaaagtactaggtcctggattttcacgatctacaggaaatgcatttaaagacgttaaaaatttaccaatccatttatttttgaataattcttttttagccatataatgaatttgattaggatataatgccatacctagcataatgacttcgttataactttcatgtgtacaagttacgacatatttactatccttaggaatattatctttaccgattacgtataatgattttgacattttaactaaaatgaaattcaaaatcttactaatcactgaatacattgtgccacctacttaacttatttgtttataacaactagattttatcactatatttttactagaacaagatagtctgaaaatacatctaaagttgtatagtgtattactagcaataattataaaaaaaagacataattaaagcatatataaatcatataatggaggttaagtatgtcagattttaatcatacagatcattctacaacaaaccatagccaaacacctagatacagaagacctaaatttccatggtttaaaacagtcatcgttgcattgattgctggaatcattggtgcacttctagtacttggtataggcaaagtattaaatagtacaattttaaataaagatggttcaactgtccagacaacaaataataaaggtggcaatcaattagacggtcaaagcaagaaattcggtaccgttcatgaaatgataaaatctgtctcccctacaattgttggagttattaacatgcaaaaagcatcaagtgtagacgacttattaaaaggcaaatcatctaaaccatctgaagccggagtaggttcaggtgtcatctatcaaataaacaacaattcagcttatatcgttacaaacaatcatgttattgatggcgcaaatgaaattagagtccaattacataataaaaaacaagttaaagcgaaattagttggtaaagatgcagtaactgatattgctgtacttaaaattgaaaatacaaaaggtattaaagcgattcaatttgccaactcttcaaaagtacaaactggtgatagcgtattcgcaatgggtaacccattaggattacaatttgctaactctgtaacatctggtatcatttcagcaagtgaacgtactattgacgctgagacaactggtggcaatacaaaagtcagcgttcttcaaacagatgctgctattaacccaggtaactcaggtggcgcattagtagatattaatggtaatttagttggtattaactcaatgaaaattgctgcgacacaagttgaaggtatcgggtttgccattccaagtaatgaagttaaagtaacaattgaacaacttgtaaaacatggtaaaattgaccgcccttcgattggtattggtttaattaatttgaaagatattcctgaagaagagcgcgagcaacttcatactgatagcgaagacggtatttatgtcgcaaaagctgatagtgatattgatcttaaaaaaggtgatattattacagaaattgatggcaagaaaattaaagatgatgttgatttaagaagctatttatatgaaaataaaaaacctggtgaatcagtcactgttaccgttatccgtgatggtaaaacaaaagaagttaaagtgaaattaaaacaacaaaaagaacaaccaaaacgtcaaagccgatcagaacgtcaatcacctggccaaggcgatagagatttctttagataatttacagacagaaaagtacattaagagcctactcatattcattcctaagaatgtaatgagtaggctctaatttattgagctatgcaattatatttattgatagttaaccatgaagtattttttcttaccgcgacgaataatcgtaaattcgccatcaattttatcttctggtgctaaagcataattaacatcttgttgtctctcaccattaatataaatcgcaccattgttaacatcttcacgtgcttgtcgtttagaaggagaaatgcctgtttcaataaggacttcaacgatatttgttgtgtcatttgataatgtcacttgaggcacatctttaaatccatcttttaattctttcgctgataatgattttaaatcaccactaaataatgcttgtgaaatacggattgcatcttttaatgcatcttcaccatgaataaatttagttacttcttcagctaatgttttttgagcttcacgtaaatgcggtgcttcatttttagattgttctaagcgatcaatttcttcttttcctaagaaagtaaagtattttaagaatttaattacatcttcgtctgattgattaatccagaattgataaaattcataaggacttgttttttcagcatctaaccaaacagcacctgactcagatttaccaaatttcttaccatctgatttagttacaagcggaatagttaaaccgtatgcctctgtttgaccatacatacggcgcattaattcaataccacttgtgatattaccccattgatctgatccacctacttgaatcttacaattcaattctctattcaaatgaccgaaatcaatagcttgtaaaatcgtgtatgtgaattctgtatatgaaataccatgttctaaacgactttggattgaatctttacctaacatgtaattaacgccgacgtgtttaccatagtcacgtaaaaagctaattaatgaaatttgtcctaaccagtctctattattaacaagcactgcaccatggtctgttccaaattcaaaaatattatgcatttgcttactaataccttcgatatttttatctacttgttcttctgtttgtagcacacgttcttctgatttacctgatggatcaccaatcatacctgtaccaccgccaattaaaacgataggacgatgtccatgttcttgaaaacgtcttaatgttaagaatggtagtaagtgaccaatgtgtaagctatctgccgttggatcagcaccgcagtataacgtcacttgttctttatttaataaatcttcaataccttgttcatcagtttgttgataaataagacctctccattttaaatcttcaattaatacattcgtcattattatttcctcctatttataattatttattgaatacttgttaaaatactttaaaggtttttgaacgtaaaaaacccttacaacaaatatgtaagggcgcgattgcacgttaccaccaaacttaaacataatcataagataatgttcactctattaatgatacgttcattaataaacgtaggacatgttagttataaaggtgtattcatattattaaaaacactagttcacagcgaccactagctctctgatgatttcaaataatattacttgtccttttatcctattctttatgcattttctctaattataattaacgttaaaataaaagtcaaattgcttaaatatggtatactatacgtaatttaggaggttaaagatgacgaatcaagacaacaatcatcaattgaatcatcgtatatatcattttgaaaagatatataaagctatcaaacatgtcattgtttttatatttatgattttcattgccatcgttgctatcgctgtgattgcgatgtctttatattttcatcatttaactaaaacatccgactcattatcagatgatgctttaataaaaaaagttcgacaaatacctggcgatgaattattagatcataataacaaaaatttattatatgagtataaccattctcaaaactcactcattataggccctaaaacatcaagtccaaatgtcattaaagcattaacgtcatctgaagacactttattttataaacatgatggcatcttaccaaaggcaattttaagagcaatgatacaagatatttttaatactgatcaaagttcaggtggtagcacaattacacaacaacttgttaaaaatcaagttcttaccaacgaaaaaacatatagtagaaaagcaaatgaacttcgcctagcaattagattagaacacctactctcaaaagatgaaattatatatacatatttaaatatagttcccttcggtagagattataatggcgctaatatttccggaattgcatccgcttcatatagtttgtttggtattccaccaaaagatttatcaattgcacaatctgcataccttatcggtttgttgcaaagcccatatggctatacaccctacgaaaaagatggaacgttaaaatcagataaagatttgaaatatagtatccaaagacaacattatgtattaaagcgtatgttaatcgaagatcaaatcactgaaaaagaatacaacgacgcattaaaatatgatattaaatcacatttgttaaatcgaaaaaagcgttaattgatgctcactttttaaagtaaccacaacaatgcatccaaatattaaaaacagcagtaagattattttcaattagaaaatttctcactgctgttctttattttaaatactctaaaggaaagccattaaaccaatcaatagtttataatttaattgctttcacattgtctacaaagttaatcatacatatgctatatccagttaattatttagattttttttgaatttcggaatgaataaagctaacatacctaataacgcatataagccccaccatgattgacttgaagttgtttctccagtttttggtagcattttagattgactaagtttgttttctttcgatggtgtgccagccttttcttttgctttcactgttttgtctacagttttatgaatatcactcggcagatgttcagttgtttttttgtcagtaactttgatagtactgataggatgatattgcattgtatcaatgtttgtttcagttccagtattattattaactttatttttatcggcaatatgatccatctgtatgactttgtctttatttttattagagtctttatcagtatcgacattagatgacattccaacgctattatcaacacccttatcagtgtctttagcaatttgagtatccatttctttaagatcatacttatcgaagtgattattatccgacatatcggataaatgatcaacatcatgttgcacgtctttgtcaatattattatcagcatctttaaccatgtcagactctggttctatcacatctgctttatcagacgcatcttttggatttgttgcagtgctgctattttcagctatatctgtatcagaaaccttatcttcttgtcctgtttgtacatttagcggttcacttgtgttattttgtgatgtgtcctcatcttttgtcttgatatcctgatttataattctgacatgatattgaccttcataaccaatgtttgccacaacgactttaacaatcgcattgtaaactgctttgtcaggcatatatgggaaaatcagcgttctagaattatttttaggatctttagaaacagtagtgacacgtttaccttctacaattaaatctttccagtaactgtcatcctttgttttcatcactacatatttttgaccatttaaagttgctgtatagaatggatgttcaacaaatccatccatgactgactcactattttcttcactttcaaaaacaacaaaatgcgcttcttgtaaatctgttaattgatcatttgtaggtgtaacattttcaaattccgtcactgctgatttaacttgatcagctaactctactctagtttgatctaatttctttttatattccgccttatatttttctggcaatttctcttgtaatttttctaattcataaacttgtctttctaacgttttagctttgtgatacggagctaataatttttgtaaattgtatgtttcctcatccacatagtcgtctgggttattagtaataggctgtgcaaagaccattagcgtataatcatagtcttcatggatgttctcaccatattcaatagatgacacaattttaacttctctcgtaccattagatactgggaaacgaatataggcataatctttatcagaatcatatgatactaattcgactggtaactttttgtcaccttcataaacttcaaatttcttccatgttgaagctgtctttaaacctaattcaattattggtcctgtttttgtaaaaatgacagttgctggttcaacagtactagcataatgatagaactgtctttcacctttatcatttttcatttgaaaatcaattggtcgccaattatcagctgtatgttctttatcgatgatagccgggtttttaattgcatcttgtagtgattcatctgctggtggatactgttgattaacatccgactgattacttgactcattcgttttatcgttagtattaccattagaatttgtttcatgagctggttggcttgacgcttgatctgcattcgctgacgattttggttgtgcaggttgactcatattggtcgttgtctgcggttgatcactagtattgttcgtcgttgatgtattttgattagatatattcgtgtttgtttgattacttgcgtctgaacttgattgatcattcgttgctactgcatcatttgtatctgattttacaagtgaagaatcgttataaataggtttagcaaatactaatttagtataatcataatttgtttcagctccatcatcaatttgagttgaagaaacaattttcaattcttgtgtgccatctgaaactgggaatcgaatataggcatggtcttctggtacaggactatatgatacaagtctcactggcagtttttgattgttttcatatacttcaaacttcttccatgttgaagcagtattgatgtctaattcaacttctgctttctttttagtgtaatacacatctgctggatctttgatgctgaaaaagtgatagtattgcgtttcattgtttttatctaataattggaaattgacttgttctcttggacctatatcatgttctttattttctaatgcaggatctttaattgcatctttaagtgattcatccgctacaggataggttttcgcagtgtttgctggttgcgtagcaggttgtgtttgatttgtatcctttggtggctgagttgtagttgcattattattttgattttccgagattttatctgaagtatttgtattttctgctgcttgtgcttgatgttgagaagtaattaaaaatagtgtactgacaatgaccgatgcaacgcctagagttgattttctaatagaatagaaagaccttaattttgggtgatgtttgttcatgttgttaacaactcctataagattgtatttaattgataataattatcaatatcaattattagtgttaattgtagcgcattccaattaaatattgcaacctattttattaaaaatttttaatatgaatatccattgcatcgcttccctattcttcaagcacactttttatcttcaaatacatttattaaccaccttcaaacattgccgttagattcgccaaattgaatctatttttagcacagcaaaaaaaccgaactgctgaaataatgcatctccaacagtccggtctattaaactaattacttaactttattaaacaattgccatgatgtattagaatagcccaattgcatgaccatcatcagtaacatccatgtttaatgctgctggttttttaggtaaaccaggcatagtcatgattgcacctgtcaatgctacgataaatcctgcacctgttttcgcttctaattcacgaattgtaatttcaaatcctgatggtgcacctaacaacgtttgatcatctgagaatgaatattgtgttttcgccatgcatactgggtaattatcccaaccattttctttaaattgttttaattgtttttgcgctttactgctaaacgttacttttgaaccgccatagatttcagtcacaatcttttcaatcttttgctctaatggtaattctaattcatataaaggtttaaatgaattaggttgatcaatgacttctaatacttcatttgctaagtcaacgccacctttaccacctttttcccaaacttcagttaaggcaattcgtacgttattttctttagcccaagattttacatattctacttctgcatcggtatcatgtataaatgcattaattgcaacaaccggttctacaccgaattttttaatattattaacatgacgctctaaattaacaattcctgcttttactgcttctacattttcttcttttaaattatcttttgctacaccaccatgcatttttaatgcacgaatcgttgctacaactacaactgctgctgggtcgaatccagcttcacgtgccttaatgtccatgaatttttcagcgcctaagtctgaaccaaatccagcttccgttacaacgatatcagctaaatcacgtgctgtttcagttgctaaaattgagttacaaccgtgtgcgatattcgcaaatggtccaccatgaactaatgctggtgtcccttcaattgattgtactaagtttggtttaattgcatcttttaaaatcattgcaagtgcaccttgcacttttaaatctgcaactgtaactggcttgcgatctctagtgtaaccaatagtaatacgactaattttatcttttaagtctttaatacttctacttaaacataaaatcgccataatttcagacgctactgtaatattaaagccatcttcacgtggtacaccatttgtaggtccacctaacccaacgtttacatgtctaagtgcacgatcattcatatctaatacacgtttccattcaatacgtctttgatcgattcctaattcattaccttggtgaatatgattatctataaacgcagacaatgcattattagcagttgtaatcgcatggaaatccccattaaaatgtaagttgatatcttccataggtaagacttgcgcataaccaccaccagttgcgccacctttaataccgaaagttggtcctaaggcaggttcacgtaacgctaccataacgttcttcttcaactcatgaaatgcgtcagctaaaccaacagtaactgttgatttgccctcacctgctggtgttggactcattgcagttactaaaacaactttccctttgctatctcttggcgtaattttattaatgtcgattttagctttgtaatgaccataaggttctaatgcatcctctgaaatgcctaccgatgcagcaatatccttaattggttgtagtgttgattgattcgcaatatctaaatctgataaatgagtcaacttttttcgcccctttttgtttattttatgcattttaaatatgtaagttgtagctaagaaatttttacttacattcatataataacgaactgttaaaaacttgtcgactaaatcgggttagcgctttcatttttgcaataaattcacttattaaagttttgtattacacaacttttagcgcttgatactattgataactatatttttctattatttaaaatagtcatattccaaaggtcatattaaaaataaaaagcaatataaagatatgccattattgttatgtcatcattttcaaatgctttctacgaaataatatgacacaagttaacagctctttatattgcttatcataaagtaaactaatatttaaacattaacatgaaatatgttgtctccctttattcttagaaagaaatcttcaaaaacattcatgtcattattccattgtacttaaatcccctgcatctaaatttaattcccaagcttttaatacacgtctcataattttacctgagcgtgttttaggtaatttatctttaaattcgatttcacgtggtgctgcatgtgccgacaaaccttctttaacaaataaacgaatttcttcttttaattcgtctgttggttcatatccttttctcagtgcaacaaacgccttaattatttcaccgcgaaccggatcaggtttaccaataattcctgcttcggcaactgcttcgtgttcaaccaattttgactcaacctcaaatggtccaactcgttcaccagctgtcataattacatcatcaacacgtccttggaaccagaagtaaccatcttcatctttatatgccgaatcaccagatacataccagtctccaataaaatatgacttatatttttctggattcttccagatacgatacatcattgatggccagcctttttttatagcaaggttgcccattcgatttggtggtaattcattacctgcatcatcgataattgcagcttgaataccaggtaatggtttgcccattgagccaagcttgacgtccatcgttggatagttaacaatcatatgtccacctgtttctgtcatccaccaagtatctaacaccgttaaaccgtatacttttttcgcccattttataacttcaggatttaaaggctcacctactgatagaatcgaacgtaacgatgacaagtcatatttctcaacaatatcgtcaccagcactcattaacattcttaaagctgttggtgccgtataccaaatcgtcactttaaaatcttcaatcatactataccactgttctggtgaaaagcgaccaccagctatacaatttgtaacgccatttaaccatggtgcaaaaataccataagatgttcctgtaacccaacctggatctgctgtacaccaataaacatcatcttcttgtaaatctaatacatattttccagaaatatagtgcactaacattgcttgttgaacatgcaatacacctttaggttgcccagtagaacctgatgtataatgtaaaattaaaccatcatccgactttaaccattcaatgtcaaattcatcgctagcagtttccatcaaactaataaagtctatgtaattgtcttctacatcctcatctacgacaacaatttttttcaagttcggtaatttatctacaggtactcgaggtaacaatgccttattagtaattaacactttagcttcactgttctctaatctatccgcaactgccttttccataaatgcttcaaataacggcccaacaattgcaccaatttttaaaacacctaacaacgcaaaatatagttcaggtgtacgcgacataaatataaatactctgtcacctttgtcaacttctgcatgttcagacaaaacattcgctgctttattagataaccgttgcatatctttataagtatacgattcttttctgtgctcatctttgtaatttaacgctattttatcccctaatccttgatctacatggcgatctatacattcatatgccatgttcatttttccagtttcactccaagaaaatgcttgttctacgtctttccaatcaaaagtattatatgtttcttcataatctttaaggttatgtttgccttgcgctcctttataaacttcgactttcatttgaaactcccccttcgttatgtaaaaacgctttctttctcaatattatacataacatttctaattattcaaaatttttacttttatcctttttctagtattaattattgtaaattttctatataatgaatttaatacaatcacgacgtcgattgaggagttgaaaatatgaatcatttaaagacgtatcaatccgaagattattacattcatggcaagcaatttgttattgaaggtcctttaacacacgaagatttgaaagcgcttactttcgatgcgcatttaacctcattcagagatgctgaagatcagtatgaagctttgttagaaattacaacattaccggaaggtagaatttatgttgctcgccaagatgaactcattgtgggttatgtcactttccactatcctgatgaaattgagcgctggtctacaggtaaccttccatatttaatcgaattgggggcaattgaagtcagcatcaattttaggcaattacaacttgcagaaaagctaatacaacttagcctttctagaccagaattcgaggattatatcgttataactacagaatattactggcattgggatttaaaaaattcaaagttagatgtatttgactataaaaaattaatgcagcgattaatggcaactggtggacttgaaatattcgctacagatgatccagaaataacaagtcatccagctaattgtttaatggcaagaattggcaaaaatattacattagaacagcaacaagcgtttgatgatattcgttatatgaatcggtttttcttttaatttttggaatatcggagggattatatgcaacaacattcatcaaaaactgcatatgtttattcagataagttattacaatatcgatttcatgaccaacatcccttcaatcaaatgcgtttaaaattaacaacagagctacttttgaatgcaaatttattgtctccagaacaaatagtacaacctagaattgcaacagatgacgaattaatgttaattcataaatatgattacgtcgaagcaattaagcatgcttcacatggcattatcagtgaagatgaggctaagaaatatggattaaatgatgaagagaatggtcaatttaagcatatgcaccgccatagtgccacaattgttggaggcgctttaactttagcagatcttattatgtcaggcaaagtattaaatggttgtcacttaggtggtggtttgcatcacgctcaacctggtcgagcaagtggtttttgtatatacaatgatattgcaattaccgcacaatacttagctaaagaatacaatcaacgcgttttaatcatagataccgatgcacatcatggagatggtacacaatggagtttctatgccgataaccatgttactacttattctatccatgaaaccggaaaatttcttttcccaggctctggtcactatactgagcgcggtgaagatatcggctatgggcacactgtaaatgtcccacttgaaccgtatacagaagatgcatcatttttggagtgttttaaattaacagttgagcctgtcgtaaagagttttaaacctgatattattctaagcgtaaatggtgtcgatatacattatcgtgatccactaactcatctaaattgtacgttacattcattatatgaaattccatattttgtaaaatatttagctgatacttatacgaatggaaaggtaattatgtttggtggcggaggctacaatatttggagagtcgtaccacgtgcatggagtcatgtattctttagtttaattgatcaaccaattcaaagtggttatttaccgttagaatggattaataaatggaaacattattcatctgaattattacctaaaagatgggaagatcgtttaaatgattatacctatgttccccgcacaaaagaaattagtgaaaaaaataaaaaattagctttacatatagcgagttggtacgaatctactcgtcaataagtcacctaatctgcaacgattttaaaagataaataaaaggcattcttccaacacccgtataagtcgagtcgttagatgaatgcctaattttgtgaatttattttgtagttcctcggtattcaattctgtgtggtaaaactacattcggttcttctatcttttcatcgttcatatattttgttaataagcgcatccctactgcaccgatatcatataatggttgaataacactagaaagttgtggtctaaccatctcaactaagcgtgtattattgaaactaataatttgtaattcctctggaactttaataccagcatccattgcactatgcatgataccaatagcttcttcgtcactgatacataatatagcatctggaagattacctttcattttggcaaaagcttttacgccttctttataactttcagcaccagaacaattcaatgtatcacctaattgaagaccatttttatttaacacttcagttaaacctgctaaaacatcttcttgagcttttttagaatgttctccacctactaaagcaaatgatttagcgcctttttcaattaattctcccgtaatttctttcgcagcttcagtaaaatcaatattaacagatgctatatgtgcatccttaccatctgttcctgatactactacaggtacagatgattgatttatcaattctttcatttcttcagtaattgtaccaccaaggaaaataataccatcaacttgtttacttaataagttattaaaaatttctttttccttttcaggatcgttatctgaatttgaaataattgagtgatatttatacattgttgcaatatcttcaagtccacgagcaagttgcgaataatagatattagatatatctggaatgatcacacctactgttgttgtctttttactagctaaacctctagcaacagcatttggacgataattcaaacgcttaatgacttcgttaactttatttttagtttctgctttaacattttggttcccattaacaacacgcgacactgtggccatagagacacgcgcttctcttgctacatcatatatagtaactgtcataatttcctccttgtaaacgttttattcattataataacatgttttcatttcattttcatagtttaccatattttaatttacagtaacatatttttgtttggaaaaatttagcgaaaagcttgaaataaaaacaaacgctaaatgataacaaacgatatattttaattttatataaacttttttcatttttaattgtaatattttgagaaagccttttcaaatatcaattacatttgttaaaaaaatgttcacatttcagtaacaaatgtgtgaatctattatatttacagataattcatagtcataattttaattactgctatcagtcatagtctttaataattgtgaaattggacaagtgtcgaagtattataacaatcgttaggtgtagtatagcctttatttctatacaaaaaaataatagccactctaaaagtaatatactcttagaatggctactagtttaaaattgtcaattcaaagataatattctacttcaacatgagatattagttaagtagtctatagtttccttggaatattattttaactttttagcgttatataaatcagctaaaggctttaattcatcataaaatgcttggaattcatctaaatccatttgttgacccgcatcactaagtgcaacagatggatctggatgcacctcagccataacaccatcagcacctactgctaatgctgctttcgcagttggtaacatgatatctttacgacctgtactatgcgtaacatctaccatgactggtaagtgtgtaccttgttttaaaattggtactgctgaaatatctaaagtgttacgtgtcgccttttcataagttcggattccgcgttcacataaaataatgttttgattaccttgtgaagcaatgtattcagctgcataaacaaactcttcgattgtagcagataaaccacgttttaatagaataggctttttcgtacgcccagcttcttttaataactcaaagttttgcatattacgtgcaccaatttggaatacatctaaatattcgtcggctacttcaaaatcattaggatttacaatttcactaactacatttaaatcgtatttatctttaatctgtttaagtattttaagtccttcaacacctaggccttggaagtcataaggcgatgtacgtggtttaaaagcaccgccacgaataaacttttcacctttggcatgtaaatttttagctaccgcttctacttgttcaaatgattcaacagagcatggtccaaatacaaatgatttgttgccatctccaataatacccccattatcaaatgttacaatcgtatcctcaggtttcaacttacgagatacgtataagtgtttttcattttcagatttttgtaaatctgtagaggctttaaaaatttctttaaataattgcttaattgtattatcgttaaatggtcctttgttgctatcaattaaatcgttaagcatttctttttcgcgttgtggatcatagatacgtgtaccttgttttaatttttcttcaccaattttttgagctaactcgccacgtttagacaataaatctaaaatttgatgattcagtgatacaatctcacttctgtatgattctaatttattactcatccttactcacctctactaattatttcaagtatattccactttaaagcaataaaatataatgttaaaaaatattctaacaatatcatatgtatagttcaaccctaaattgacagaaaataatcaattttctaattatatgattcgagactaccatattatgtttttttggcttttgttggaaaatttttattctattttgatattaaatacccaatgatgattgatttaatttgtgttaccattatagcttattttgaatagacatttatgcttttaagaaaaattttcgtttctgatgtctattataaatctaaaaatctaatacttacaacctaacgcttaataaaaattaacaacctttgtatattaatataaatctatagtgaacgtcactcaccaacatatgcggctatatttgaattagtgaacgtcattgtaccttctaagattcattgtttatttgattatcgaatatttttccatcttcagcttaaaatgtgcaatatcactattgtaatctaacgatgttacaaacaacataaatacatggaatgatcgcgttgcctttcaaaataaactgatgatatcaaaaaaggtaagcacctgaatgcctaccttttattttgaaattcaatttttaaaaatataatacatagcttactgctatgattgattattaaacgattttagtaatcttagtcattgaatgtacgtttttctattttacttttagctttttcaactttagcatttgacgtttttgatgcattggatgacttagcatttgttgtttttgaattcttattactagtttgattattattttgagttgacttacttgaactactttgattctttgtaccttgtgatgatttcttattatgttgctttttctgacctgaagttttatgtgtagatgcttttgatgcatttcgtttatttgaaggtgttgtttttttagattgtttacctgatttcttgtcaacagctgtattattagttgttttttcatcagatttacgtgtaataacaccattttcaaatttagcttctttttgtttaacagtgtctttattatctgtattaactgtttctgatacatcattctttttagtaactaattgaggaatttctttcaagtcatttttagcaactggtttttctgcaaataacgcttcagttaattgactctcttttgaacctggtgttaatttagcttgcttctgttttgcagcgtttgctaatctttcagcttgtgactcttctttcgatacgtttaatgtcgatgcttttggttcttcatttgatacagctgcacttttatctttctctgcttgtgtttcttttttagcttcttgaatctcttgtgcctcttgtgatgtatcacttaaattatttgcacttgcttcttcttttatcgctgcttgttgtgctttcaatgccactgcttttgattcttcatttgatacagctgcacttttatccgcttctgcttgtgcttctttcttcgcttcttgaatctcttgtgcctcttgtgacgtgtcactcaaattatttgcacttgcttcttcttttattgctgcttgttgtgcttttaatgccgatgcttttgactcttcatttgatacagctgcacttttatctgtttctgcttgtgcttcttcttttagcttcttgaatctcttgtgcctcttgtgatgtatcacttaaattatttgcacttgcttcttcttttatcgctgcttgttgtgcttttaatgccgcttgctcatttttagatttgtttaaaaatccttcaacacgttcttttgtaaaggcaaccgtttcttcaagttgcgtttttctttcttcaaacttttgcgacagttcttgttctttgacttttaaatcatctgctttttgataaactttatttttaaaatacaagcctaaagctgaaccaacaagcgcgccagttataaaactaacaacaaaatctttacggttcggtagtggttcattttgataagtgtgtttattttttaatgttcttttattattttgttgctgcgtcatttgtatatcctcctataacaaatgcacttaaataagtaacaacctcatttaagtgcatttgtttaattattaattatttatctactcgagaagtatagctatgatttgcatcagttgctacattattagctttgtaatttgcacttccacgacggtagtgtctattttgccatttgtctgcaatttccattgcaacatttgaccattgaacaacttgtgagattttatcttcattttgagaaatattatgtgtaattgaatttgttacacgatctacagagctgtttaacgtttgtactgagtcaccgatacctttaacggcatctacaactgagtttaaacgatctactttaccttggatatcctcagttaaacggtttactttatgaagtaaatctgttgtttcacgagtaataccttgaacttgaccttctacaccatcaagtgtttttgcaacataatctaagtttttcttaacagaatttaatacagctacgataccgatacataaaattaagaatgcaatcgcagcgataattccagcaattggtaaaatccaatccattaaaaacgcctcctaattaacatgtaataatgtcattaataataaatacccatactactctattataaacatattaaaacgcatttttcatgcctaatttatctaaatatgcattttgtaatttttgaatatcacctgcacccataaataaaacaacagcattatcaaattgttctaatacatcaatagaatcttcattaattaacgatgcaccttcaattttatcaattaaatcttgtatcgttaatgcgccagtattttctctaattgatccaaaaatttcacataagaatacacgatctgctttacttaaactttctgcaaattcatttaaaaatgcttgtgttctagagaaagtgtgtggttgaaatactgcaacaacttctttatgtggatatttttttcgtgctgtttcaattgtagcactaatttctcttggatggtgtgcataatcatctacgataacttgatttgcaattgtagtttcattgaaacgacgtttaacaccaccaaacgtttctaatgcttctttaatatttgtaacatctagcttctctaaataactaatcgcaattacagctaatgcatttaaaactgtatggtcaccatattgtggagacaggaagtgatcataaaactcaccatccacatacacatcaaaagcagtacctttatccgtaatttgaatattttgagcataaatgtcatccgaatctttaaatccatagtaataaattggaacatctgcttcaattttacgtagatgttcatcatcaccccaagcaataataccttttttaacattatgtgccatttcttggaatgcatcaaaaacatcattaatatctttgaaataatcaggatgatcgaaatcaatatttgtcataattgcgtaatcaggtttataacttaaaaagtgacgtctatattcacatgcctcaaaagcgaaataatcactttcaggcaatcccatacctgtgccatcaccaattaaaaatgaagtctttttatcaccattcataacatgtgataataaacctgttgtagaagttttaccgtgtgcaccagttacagctactgaagtatattgatcaataatctgtcctaaaaaatcattataacttacaacatctaatttcaattgatgtgcacgtactatttcttcatggctactcgcgaatgcattaccttgtataactaccatatcttcttttatgttattagcatcaaatggtaatatttttatccccttatttctaagagcaacttctgtaaatacgtagttctcaatatccgatccttgaacttcatgtcctaaatcatgcatgatttgtgctaatgaactcatgccagaacctttaattccgacaaaatgatagtgtgtcattatataaaactccttactcataattattctttatttaaatctgcttccgtaacataaacatcccttggttttgaaccattagcactcgaaacataaccgagttgctctaattgatcgataattcttgctgctctattatagccaatttggaaatgtctttggattaatgatgttgaaatatgtccttcattaaccataaatgcacaaacatcatcaaataattcatcttgtgattgtgtttgtgtttttttcaacaattctttttcttcaaatagatagtccggttctctttgttgtttgataaaatcaacaacatcatcaatttcgtcatcagaaacaaatgtaccttgaactctaatcggtttattcataccgctaccaagatataacatatcgccatatcctaacaagcgttctgctccaccactgtctaatatcgttctcgaatctacacttgatgataccataaatgcaattcttgttggtatgttggctttaattaaacctgtaattacattgacagatggtctttgcgtagctactaacatatgaataccacaagctctcgctttttgagcaattctagcaatagactgctcaacttcttgcggagccatcatcattaaatcagccaactcatcaattactatgacaatttttggcattctttcatcatatggtgcttttttgttaaatgctgttatattacgtacgtggtaatgtgcaaataacttataacgtctttccatttcttctacggcccattttaaactctgtgtagctgctttgacatctgtaattaccggtgcaactaaatgtggcaaaccattataaggagctaattcaaccatttttggatcaataagtaataatcttaattcctcaggatgatttttatatagtaaagacatcaaaatactattgatacaaactgatttccctgatccagttgcacctgcaattagtgcgtgtggcgttttagcaatatccataagtaatggttcattattaattctataccccatcgcaactgttaatttagattcagcatttttaaaacttggagattcaataatagaacgtaagttgaccgtcgttggattttggttcggaacttcaataccaacacgactagttcctggaattggcgcttctatacgaatatctttcgctgccaatgccattttaatgtcatcttgtaatgccgtaattcttgaaactttaacacctttttcaactgataattcaaatcttgtaacacttggaccttcagttacatcttgtacttctgcaggtacattaaagtaaaataacgcgtcattaagttctttctttttatctgtaatccagtcctcgtccggctcaataacttgtggttcttctagtaatgaaacacttggcaatttaatatttgggcctttacgaatcatcggcttagatgtttgtacagcttgatttgttgcaacatctggttggttcgtccgaggtctattttcattagctgtatcttcattttgatttgaaaatgaaggctgtaaatctttttgttgatcatcattatcttgttgtccactagtattgtttggatgtgttgtttcttcgctttcttcagttatgtcgcttacttctgaaactgaagacgaagttgattgatgaacttgctcattttccaattgattatcatcttggctttcttcaaatatttccgtttgagttgaatcagcagaaggtttctgctctgaatattgttgtgcattttgataatcattttctgtttctgcatgaccaataagttgattgttctcaacattgtttgatgtcatattatttgttttatatgcatttgtgtttgactcttgtgaatcagtgcttgatgatggtgtggcttgactctcagtcttgctttcactcacagcttgcttactttgtacaggctttaattcaggcacattgacttttgaatgctttttacgatccatcatacgctttttatcagatggcgtcatgacaacattaaatggtcttttacttaaagttgaaaccttttcagtctgtttctttggatttgcgttttcaatagttttctcttcgacattttgttcactttcagctgctttgttttgcacattttctgtaatttctgcgttttgcttttctatttcattcatgcttgaatcttccacaacatgaccatcattcacatcattcgttttcaatgagttgacacttaagtttgtttggtcatcttttttatgacgcggcgctaattcaatttcattatcaaccgttttatcgatattattaacttgagattcagttactgcgtgctcttgcgttttaggagcgtctacatgcatttcagacgcgtctctattggtattatcttcgctatttgaagtagtatcctcatctacttctgtatcatttaattcataaaattctgcatcatcgatttgacttcctgaatattcttctttattcgttgctccatcttcttctgaatcagcaattaatctggattgattttttagttcatcttgattatttacttcaacgttatgctgcagtgctgattgacgttgagacgttacatccgaaaccgtaacttcatcatctgacaattgttttgttgtcgatacttgattcaaactaacttcctcataattgtatggactttcatctacatgagtgtcatcagtgtcttcattttgtattgacggttgtttattttcatcatttgatacagcttcattctctatgccatttgtatgaagctgactagcctctgtactattatctgttaagtcactatcatcatttaatgaactatcaccaacatagcgttccgcttgtttagcatacatttcatcaattgcacgttgtattgcatcttgctcttcgtttttatgttcttcacgcttttgttgcaacgcttttttaaatcgacgcttttgaagcactttacgttctcgttcacgtctaatttcttcaacaatttgtgaagcataaatattttctattttgatagtattatcaacttttgaataattaggcattgattttgttgttgatgatacattttcatcagatgatttagatgcagttccttgtttgacaacactatcattttgtttctcttgttctaattgtttattttgagacgtttgcgtcttagctacatatttatcatatttttgtttatctgactcaactttttctgaaggtttacttacagggatacggccattttctaactttttaggtttcattgtgccaaaaatagctgacggtacctctgaagtcttgaaactttctttgtgataatctggagttgaatctttagcacgatgatttgtattattagaatacatattgtgtgcttttgacttgtgcgtttccttctcaataccattaattgcagaaacatatgtacctggcttattcgtatggtaatgtgaatgatctttatattttatactttgctgtgatattttagaattcccacgttgttcactataattttgttcttcagttgtttgatttcttctacggcgatgtcgtttttgtgaacgagaatcgtggctttgtttgcgatagtctcgatggtattgttctttttcatctgaaatagtatctgcagattgttcaacattttcattttcataagctacgctcataggaaaacggaattttcccctcggacgactataaatatcattattttgaggcagtaatgagtcatgatcgttatctatattttgtgattcttgacgtctttttttctttctatgaatcaagtcatcatttgaatcattatcttcgccgaataatttatcaaaccagctcatattttcactaccttccttaattattcaaaaaatgcttgtccaatttcatagctgtcatttaataccataatacctttttcttcaggtgcattaggtaaattcaattctttcattgaacaaatcataccgcttgaggcaacaccacgtaattcagcatctttaattaccataccgctaggcatcactgcacctactttagcaacaacaactttctgtccagcttcaacgttaggcgcgccacatacaatttgtaatgtgtcatttccaacgtttacatttagtacacttaatttatctgcatcaggatgtttgtctttagtttcaacgtagccaactacaaatttcggtgatagatcagcatttaatttataatcaaaaccagcttctgaaatacgcttttggaatacatttacaagttcatcagttaatttaatatgacctgtttcttcaattgttatatcttttgaaatttcaaaaatattataacctacaacattaccttcattagtaatttcaacaacgttaccttttttattgtagtttaattcaccttcaactggttcaatttgtaaaaatgcgacatctcctacatatttaggattgtaaaataaattcattatgacaaaactccttatccaattatttctatttatctttattaaatttacgacgatttgcttctaaacgctgaatcacgtttggatctcttttttgtttattatttttacctaaaataaatatcggttcaagatgaccctgtttatatccaaaggataatgatgtaattggaactagacctttagtgaaaaattccattgttaaatgtgccatcacatcatatcctgttttattgcgtatatctgcaataattaacacatcttggtgtggcactgctacgagcatttcgccttgacattgtgcctcaatttcatttaaaaatgcagtatttagtatcctacttgcatcatacccgtcatttgagttaataaaataaaaaatattaccttttacttcatcagtcgtatatgaatttgacaattttctaacattaaacagagacatttctcttatttgttgttcagttaacttcaaatcctctaacatgctttcatcaattaaacgatatgattttcctaaatcgactgcataataaactgctgtttctgcagtatgctcatcatagataaaaggaacaccttgtttagtttttttatcaaagctagtcgctctaatgacaggcataatttgactagatgatatactctcaagggttttatctgccatttgtgcaatagcttcatcaacgtaataaacaatttcatctacaattttttcttttttatcttcatattttgcgactatagcgttaagtttaatcgtgatacctttgttattatctgttcgataaatacgcaaagtttcttcttcacgattaaatttaaaatcaacgtctaaatggcttaaacgttcctttaatttatctctcatttgaaaggtattcatatgtaacactcctaatttcgcaccttataatagtttacaataaatcaacacatagtaacagagaaaaacgagtattaccccgtttttctctagtctaaattacacgtattgagctaaaaatgcatctatctgttcaattgattttcgttcttttccaatataacttccaagcagttctccatttttatatactagaaaacttggaatccccataataccattttcaatacaaatatccataaatttatcacggtctactgatacgaagtcaaacataggatatctcgcttctaattccggtaaatctggttctatcactctacaatctggacaccagcctgcagtgaattcaaatactgtagcaccttgttttaaagattcaaattgttgttctgattcaagttgtttcatttttatgtctccttaattaatgattatatataactatttagagataataattgttattacccgattatttatattgtaatgtttctatttgattattatctaaattacaaatggcttctgaaagtaaagatctagctgcaaaatagtctcttatatcaaatactgagtctgtactatgaatatatcgtgcacatacaccaataactgcagtcggaataccaatattagctttatgaatttctccaccatctgttccacctggtgacatatagtattgatgttcaatgtcatgtgcttctactaactttaataaatagtctctaaatgcaggctttaaaatcattgtaccgtcttttatgcgaattaacgtacctttaccaagttcaccggataatggttgattacctttaacgtcattggcaggtgaacaatcgactacaaatgcaacgtctgggtctatcatctctgcagatgctttcgcaccccgtaatccaacctcttcttgaacatttgcgccaacatacaagtctacatctaattctatatcttttaataattctagtatttcaattgccaagacacaaccataacgattatcccatgctttagcactataacgatgttcagataactgtgtgaatggcgtgtgaggtacaattgtatctcctatatctattccgcgctcacgcacttcatcttcattttgagcacctatatctaatgttaaatctttaatttccggtgcaccttcactaccagtacgaaaatgtttaggtatattagaaacaacaccgataattttatcgccatttctatttttaattactaagcgttgtccttgccaaatatcatttgcaacaccacctaaatttgtgaattgaatcattccatttttagtgatgtttgtaatcataaatccaatttcatccatatgtgctgcaatcattacacgttttgcatttggatttttagattttttcacaccaaaaaaaccacccatacgattttcaataaattcatctacgtacggcgccatttgctgagtcatataattttttacttcctcttcaaaacctggtgccccatgaagctcagttaaagtttgaattcgttgtaatgttacttttttatttatgttcataaaagttctcactccttataagttattatatcatcttcaatatggtaaactaatgatatgaatttgaaatcaagggagcataaatgatgactaaactgaaatatataattccaacaataattgcagtagccattgtaattatttctaccatttcaatcatccaatttattaatcgtaaacgctataatcccgttaaagtacttaatgaagtaaaatcatattttatgaatgtcaaaggctcatatatcgtttatgaaccattcgttcatcctgaaactgataaataccgtttagtttatcaaggtggaattacaactattaaaaatggtcaaaatattcattatgatttttatgcagatgcatatactggtgaagtcattaacattgtagagcgttaatacgaattttatccatatttgatttggatcgtaaaacttaaaaatgagccacaccctaattagtaagattggatgtggctcaattttttattcttgaaaatttgtttagtaataaatctttattttagttattatcaactaatgtttcacgtaaaatatatgcatctaagttttcgccatcatcgctgtattttacagcaaagtagttttcatcatgataaaacaagaaccaatattgttgctggataaaatatggtatcatgcgttccttttcacgaatcgattgcataggataatcatcatatgccgttacccatagaggatttttatgtgcagtagtcgggaatatatcacccatatgaactgctttatctccttgactttcaatcgtaatgattgtgtggccaaagctatgacctccactatgttgcatcttgatacccggaaccggttcaaaatgtttttcgaataaaatcaacttgttactataatcgcctttattcttatcccagtatgttgatttacttcttatattaggtgcaataaactcatgccactcatcttgttgcacaacatgaatcgcattttcaaaaattgcatgtcccgcttgatcagtcaaaccggctgcgtgatcaaaatgcatatgtgtcattagcacataatcaatatcctttggcgttaaattataatttgccaaatcagcaattatatgactttcttcatctactccaaaattacgtaattgcttttcagataatttaccattaccaatacccgcatctataatcaaattatattgagccgtttgaatcaaaattggatgtgtcggtaaattgatttgatttcgttcatttgcattgtattgctttgaccacaacggcttcggaacaacaccaaacattgcaccgccatccattcttgtattgccgccatttagataatgaatagatatatccccgattttcataacatcacctattctttctgtattcgttattacaattagcatgtgtttattacatcatatcactattcataaatgcgaacaaaaacgaaacgccccacactaatacacttccaactacttataaagattaatgcaatcatattatatgtaaatgcatcataaccatcggactgtaattttaaattaataattaaaatttccaagtaaaatgcaagctttattctttcaaatcaaaggtatttagtataacattgttcataggcgcaattgtctcctttagtttaggtttggtcactttaaattacagaggcaatagcgctttttttatattcaaaatcaaaaaatcggacagatgaaaagtaaaatacttttttccatcagtccgatttattatagaatctttatctatagaaccattatagtacgaaaaaacacttatgattgtatgtgtacataccctcataagtgctttatttttgtgaatggaatttcgcttccatacgataaatacgtgaccctttatccgaaaatttcttttcatattctgttaaaatattactgccatcgtcttcttgatgtaaatttagatttatttttgtaaaatacattccaaattgagacatactttctaaactgtaggcaaatagtcctctgttatcagttttaaaatgtaaatctccttcatcatttaagatttgttgatacaacgctaaaaacgtatgatacgttaaacgtcgttttgcatgacgattttttggccatggatctgaaaagttcaaataaatacgcgaaacttcgccgtctttaaaatactcatttaattcaatggcatcattacaaataatctttaaatttgttaaacccatctctttaactttatccaatactttataaacgatacttttctcacgttccattgaaatatagttaatatgaggattttgagcagctaatgttgtaataaactgccccattcccgaaccaatttcaatgtgtatcggttgcgttttatcaaaccattcagtcattttccctgcatgttgaccgtccatgtcaaccaattcaggatgatcttttaaataatcttcagcccatggtttgtatcgaactctcatattttattctcctcttaaataaacatgttactattcataacttcatttaggaatttaagccaagtgttcatatccttatatcttttttgctcttcataccattgaacaagacctatagattgaattaccgtataccatttcatacgcttatttaaattcaagctctcttgaacaccatatgtttcaagccattcagaccattgttgttgtggaacatagttgtaaagcagcattccgatatcaattgccgggtctgcaatcattgcgccttcccaatcgactaaaaatagttcatcacgatcagataataaccaattattatgattcacatcaccatgtacaactgtgaaaaaacgtgaatctaaactcggcatatgctcttccaaataggttaatgattttctcacaatatgatgtgttaaaacttctcttgataaagaggcattaattttattaagcataatctcaggagtaatgggttccatttccatacgctttaacatacttaataaaggtctagaattgtgtatcttctttaataaatgtgcaactcttatttgcttcatttcatttgaagatagttcacggccatttttccaatgttgtgctgtaacaacctcgcctgtttctatgcgtttcgtccatactaatttgggcacaataccttctgctgataatgccgcaataaatggatttgaatttcgttttaaaaacaacttttgtccatcttgttcagccatatatgcttcgccagatgcaccacctgcagaatcaagtgtccaccctaattgataaaactgctccaactcgtccacctcactttcaattagaaaatggctctagaaataggtttttcaagagccatatattctaatttataacaccatactggtacaaatattatgtccagataattattgtaaatcctcaactaatgcctactttaaacaacttaaaacaaatcaatatgtctgtcattgacaccataccttctaaagtcgcttacatgacatataatgttaccgtgtctaaaactacatgtttttgaatctttgtaggcgataaactctagttttcaaaataattactatcccattttcatggttagcataaatttatgaactgtaacatttacgtacttagtaaaatatgatgcacatcatatttgtaactcatagaaaattttataatttttatcattatatttcaactgaaaatgagaaacaaaatggcactttttactaatatgtgttttctaaacaacacttttaagcttcgttttaaattataacataattcacttacgaaagttgataaatttaagtaatttaatctaaaaatatgatgaaagaattttaaatactgtgtgactctatatacttttcaaatccttcttgtagttgacgtgtaattgggccaactttaccatcattaactggttcaccatctaatttaataacaggtgtaacctcagctgaagtacttgaaacaataacttcatctgcgtttttcaagaaatctacagtaaacgtttcttctttaaatgggatgttatagtcttcggcaatttttttaattacaattcgtgtaataccattaagaatatagttgttaatcggatgtgtataaatcacaccgtctttaattgcataagcattacttgaagatccttcagttacagtttcgcctcgatgttgaattgcttcaactgcattatatttcacagcatattcttttgctaatacatttcctaataagttcaagcttttaatgtcgcaacgtaaccatcggatatcttcaacggtaacaccattcacaccattttctaaatgatcataaggacgatcataactctttgtataagcaacaattgctggttctacttcaggtgtcgggaagctatgatttctttcagctacaccacgcgttgcttgaatataaattgccccagtttcaatttgattcatatcaactaatttacgagatagttcaattaattcttctacagaataatttaaatctaaaccaatctcattggcactacgtaaaaatctttcgtaatgttctgttactgtaaataacttaccattatatacgcgaatgtattcataaataccatcgccaaatacgtatcctctgtcgttgtatgaaacctttgcttcacttggacttacaaactcaccatttaaaaaaattttttccatatattattcctccacgcataatgaataaattgcttctaaataaatactagttgcgttaaataactgttttttagtgatatattcatttttctgatgcattaaatcttcagaatcactaaacattgcgccaaatgctacacccttgtctaagtttctcgcataagtaccgccacctatagtataaggttcagtcatatcatttgtttgatttctatatgcagtaactaacttttgtacaaaaggatcatttttatcaacataatgtggtggttggactttacctaatttcacttcaaagccatattgttgaatctcatttgcaaaacgatccatagctttttcaaattcaaatccttctgggtagcgcaagttgataccgaaaagacccgcattttcattatcatatgtaataacaccaatgttagttgtcacatcacccatgacatctgtatggaatttcattcccatcttttcaccaaaatctgaattaaataagtagcgattactaaatgctacaaacgcttgtgcattattatcaagatttaatgatgctaagaattttagtaagtaaagacccgcattcacaccgatagatggatccataccatgaaccgctttaccttcaactgttaaaactagaatgccactatcaacagtactatcaccttgtaaatgattttgttctaaaaagtactcaaagtcttgaataacatctgtcatattttctttaacaagcactcttgcttctgcatgatcaggtaccatgttgtaacgttcaccagatttaaaagttattaattcataatcaggttcatcttgatcttcagcaagcttattttgaactaaatcaaatgttgtaatgcctttttcaccatgaatacacggaaattctgcatctggtgcaaaacctaatgttggcatttcttctgttttaaaatagcgatccgtacatttccaatcagattcttcatccgtaccaataatcatatgaatacgtttcttccaatccacattcatatcttctaatatcttaattgcataataagcagcaattgttggacctttgtcatcaagtgtacctctagctatgatagcatcttctgttacaaccggctcaaacggattactatcccatccatcaccagcaggaacaacgtcaacatgacataagatacctaatacgtcatttcctttacctgcttcaattcttcctgcaatatgatccacatcatgtgttgtaaatccatctctatgtgcaatttcatacatgtagtctaatgccttacgaggacctggaccaactggtgcgtcttctgatgcttttgcatcatctctcacactttcaattgctaataatccttttaagtcattaatgatttgatcttcgtattgttgaactttttctttccacattcgaaatcgacttccttttttctataagttaaactctattttacatgaaatgatataaaaactacaataagatgtcagaaaataataaaaaggaacaaaacgatgctatcgatatgacacaaatcattaatagctgctttgttcctttttaatttatatatttaaatcaagagctcgagatataagtcaatgcactaggcacacaatttaatattgactgtaattaactgaacgaaaatgcgccccggagcaccaacacagaaactggtcaacagtcagctttcaataatgtgcaagttggggggcccaacatagagaatttctaaaagataaagaaatacgctttctttagatattagtatttcttatgcatgaatttcactcatgtattcttctttctatatgcatattagctatgactaacgataaagaaccactatttaataaatcatagtggttctttatcatttctgtcttactcacatcttattctttatcagataatgcatttttattcttttttaaatcttcttcagtgacgatacgtaaattattatttggtgctacgccaccttcatcatcaaatttacctttttcaatactttcgtcagtcttattgtcatattcggtaaattttgatttttcttcttcgaaaaatgcttttggattattttttaatctattagcatattctttcggatttgtttttacttctttaattgtttcattagcaattgttcctaattgcgtcgctttatccttagcattatctttatagctttgaggatcttgtttatatttattatattctgctttcagcttgtcacgactatctttacgtgtaacaagtacagctgctacagcgccacctatacctaaaatcgctttaaataaattaccttttgccatatcaatcgtctcccttttatttataatttaatttgtcaaaatcattttcagttaataaacgatattctcctgaatctaaattgctatccaattctaaatcagcaattttgatacgtcttaaatgtaatacctcattttgaatgctatgaaacattcgtttaacttgatgatattttccttcataaattgttacgtgtgacgtttgattatcaatataagttaatattgcaggcttaaccttgccatcagacagtgttacaccttctttaaaagcttgaatgtcgtcttcagtgataggatttgctgaaataacttcatattttttagaaacatgtttgtttggactcattaattcatgattaaaatcaccatcattcgttatcaataaaagcccttctgtatctttatcaagacgaccaaccggaaaaatatttagatgttggtattcaggtattaaatcaataacggtttttgaatgatgatcttcagttgccgatatataaccttttggcttatttaacataatatagacattttcaacgtattctattaattctccacgaactgatatcatatcgttttctggttctatatgtgtttttggtgatttaattacttgttcgttgacatttacaaggccttttttaagtaactgtttgacctcattacgtgtaccgacgcccatatttgctaaaaatttatctattctcatcgtaaaaacctaactctacgtcttaatttttcaggaatttcacctaaaaattcgtccgcaagacgcgttttaattgtgattgtaccgtaaattagaatacctactgtaacacctaaaataataatgattaagtaaccaagtttagtaggttctaagaatagatttgcaaggaagaatactaattctacacctagcatcataataaatgaatacaagaatatttttgcaaaatgaatccaactatagctgaatttaaacttcgcatattttttaagaatatagaaattacatccaattgcaaataataatgcgatactagtacttaaaattgcaccaggtgtatggaataacataattaatggatagtttaacgctaacttgataactacagaagctaaaataacataaactgttaatttctgtttatctataccttgtaacattgatgccgttacacttaatagtgaaattagtattgctacaggcgcataatagaataataaacgactaccatcatggttagggtcatgacctaatacaattggatcgtaaccatagaaaactgtgaataatggttgtgccaaggccataattccaatactagctggaacagttataaacattaatacaccaatagatgttctaatttgatgatgcatttcatgtaagcgaccttctgcaaatgttttagtaatataaggaattaaacttactgcaaagccagcacttaatgatgtcggaatcattacaattttattagttgacatatttaacatattaaagaatatatcttgtaactgtgaaggtataccaactaaagataaagcaccgttatgtgtaaattgatctactaagttaaataatgggtaattcaaacttacaataacgaacggaatactataagcaataatttctttatacatcttgccatatgacacatctatatctgtgtaatcagattcgaccatacgatcaatattatgcttacgctttctccagtaataccagagtgtgaatataccaataatcgcaccaactgctgctgcaaaagtagcaataccattggctaataaaatagaaccatcaaagacatttagtactaaataacttccgattaatatgaaaatcacgcgtgcaatttgctcagttacttctgacactgctgttggccccatagatttataaccttggaatatacccctccatgtcgctaatacaggaataaagataacaaccatactaatgattcttataatccaagtaatatcatcgactgaccaaccgtttttatcatgaacatttctagctaatgttaattcagaaatataaggtgctaggaaatacagtaccaagaaacctaaaacaccggtaatactcattacaataaaactcgatttataaaatttctgactgactttatatgccccaatagcattatatttcgcaacatatttcgaagctgctaatggtacacctgctgtcgcaactgcaattgcaatattatatggtgcataagcgtatgtgaacggcgccatattttcttgtccaccaattaaatagttgaatggaatgataaaaagtacgcccaataccttggtaattaatatactaatggtaattaaaaaggttccacgcaccatttctttactttcactcattacgaatctccctatctcatgtttattaaagttttgtaaactaaaagctatttctttgtaaaatcatttttcattattatgaatatatcacaaaactttatttcattgtcgtatattcaatgaattatcataacaaaattatcaacgcattgtcattgaatactcgattttgattagaatattacgaaatttcatatgaacattatactactatttgagatgaacatcgcataacagtagaaaaatcattcttatcatacacatacatcttcattttttatgaggttcacattataaatatattgaacataattgtcatctcataacacaagagatatagcaaagtttaaaaaagtactataaaatagcaattgaatgtccagtaacaaatttggaggaagcgtatatgtatcaaacaattattatcggaggcggacctagcggcttaatggcggcagtagctgcaagcgaacaaagtagcaatgtgttactcattgaaaaaaagaagggtctaggtcgtaaactcaaaatatctggtggcggtagatgtaacgtaactaatcgattaccatatgctgaaattattaagaacattcctggaaatgggaaatttttatatagtcccttttcaatttttgataatgaatccatcatagatttttttgagtctaggggtgttaaattaaaagaagaagatcacgggcgtatgtttccagtctccaacaaagcacaagacgtggttgatacattagtgacaactatcgaacgccaacatgtaacgattaaagaagaggaagctgttagtagaatcgaagttaatacagaccaaactttcactgtacatactcaaagcagcagctatgtaagtcattcacttgtgattgctacaggtggtacaagtgtccctcaaacaggttcaactggtgatggttataagttcgcacaagatttaggtcataccattacagagttattcccgaccgaagttccaattacatcagctgaacctttcatcaaatccaatcgtctaaaaggtttaagtttaaaagatgttgaattatcagtacttaagaaaaatggtaaaaaacgcatcagtcatcaaatggatatgttatttactcattttggtatcagtggtccagctacattaagatgtagtcagtttgtttataaagaacaaaaaaatcaaaagacacagcatatttctatggcaatcgatgcatttcctgaattaaaccatgaacaattaaaacaacacatcacatcattattatcggacacaccagataaaatcattaaaaacagcttgcatggactaattgaagagcgctatttactgttcatgctggaacaagctggaatcgatgaaaataccacatcacatcacttatcaaatcaacaattgaacgacttagtaaatatgtttaaagggtttgtatttaaggtaaacgggacattacctatagataaggcatttgtcacaggtggtggtgtgtcacttaaagaaattcaacctaaaacaatgatgtctaaattagttccgggattatttttatgtggtgaagtattagatatacatggttatactggtggttataatattacaagtgctctcgtaacaggacatgtcgctggattatatgccggtcattactcacatgcatcaatggaataatagtataaaatttggttcgattctcttttgtagatcaactttttcattcaattaaaaatgaccttaatataaccgattcactaaaaagtgtcgttatattaaggtcatttcgttaattatgattctttttcgtttttagtacgtcttctagctaacaaagccgcacctgtaatcagtgcaaattctttcaatggtaaatccattccttcagaacctgtatttggaagttctttttcaactttgcgcgattcatgtatctcttcttttttaataggcgtacaaacttttggagctgactgaattacttttggtgatactttcgtcgcttcagctggtaatttaattgctaaaatttcatcaacaatgaattgcgtatgttgtttgatgtcatttaatgtcgcatcttcatcaatcattctattgccatctgcaacatattgatcaattaatacttttactttagctaattgttctggtgttgcgatcgctttgaatttcgcatatgtttgttgagcaatgttatcaatgcgcagtaagctattttctttttcagtaattactgcttctatatcgcttaatgcaacattaaatcgttttaaaactgcatcaacatcagcattagtgcgtgctgtttttaattcttcatccatttgtaattttaaagcagttatagcttttaatgcatcagccttattacgatcacttacttttcgataattttgcactaaagcagtgacgcgtgcaagatcatcattaatcgttttttcagcatctggctttttaataggatgtacatctaaatcatgtattgtttgtatatttaatgatgctgttttatcaacttgtgcattgctacgatcttgatcaatttgtccaatagcagtgtcataaatattttgtaactgtgctaatatactatttctttcttctaccgttgcttgaatattcgcttcaattgcttgttttttatcgttgaataatgttgtcaattgttctcgagcagacgcctttctgttaataacaggttcgatttcacgaatttcgtttttctcatcatgcaataaatatgccacatcagcattagtcactgcactagcaatttgttgtttagctttaattaactctttttcaacttgggcaattgcagcattttgttcttcatctgtcgcttcgttatttgctttaattaaattaattttatttgtagcgatattttgaatttgttgtaatgctgttgctttaactgttgtcgctggtttaatttttgaaataatattttgagcatttatactatcttgattaacttgagcagtcttatctgcatgattgatctgatcaatagcctgattaagtgcttgttctactaaatgtttagcagctagtctttcttcttcagttgataaatcgctttgatcgattagtgcattttgagcttcggcttttacaccaacagattgacgcgctgatggtttaacttgaactttaggtaaaatcactttaatgttgtcgttgccatcagtctcagttcgatccacttctgcattcgttttgttttgtgcaatgtcatttttaattgtatttacaattttatttaaagtatcaatagcaacatctctttcatcttgagtagtatccaacgtatctcggattgcatcgagttgatttttattattttcttcaatgctatcaagcgcagctcgtttacgtcttactttaggttttatttgctctattgcctttattgtttgatttctaacatcagtaacagcagcatcttgatttgtattttctatttcttgttgcgcttgtttgagtgtgttgctaattaattgattcgcttcatctaattcatcaactgttgcatgtggtgtatcttttattgattctacttggttttctgcacttgcttttattgcttgttgtgcttcaggcttaattacaatatgaggttgtacaccttttaatgtagcaatgccatttgtttcaacacgtttcacatcattattcgttactgcttgattgatgttttgcaatgcaagtttttcattattcgctaattgatttaaagcaacttgtttttcttcatcagtcgcatgttcagcttgctcaatttcttgctttttagcttcatattgttgcttaactgcatctctagcaccagctctaacaatatgttcaggcattactaaagcaatgctatcaagcgcttgactagttgtatcatcaacttgttgatttgttctattattcgtaatatctgtcatggcttgatttacaaattcattgattttatctagtgctacttgtctttcttctgctgttgcttctttatcctgattaatcttcgcacgtaattcattcgctttttgattgattttttcacgtgcagctggtttaactttagtttcaggttgaataattttaattgctgatacaccatttgttgctgcttgattcacctgactgttcgtttgagcttggtcaatagctgcaagtgctttttctttttctttagctaatgcttgtgaagcaacttctttctcattatctgttgaatcaagactattatcaatttgctgttgcttttctttaacagctttttcaatatctgcaattgcctttggtttaattactacttcggcttcaacattatctatagcatttaccgcttgatttgtagttgcgtctacctgatcatttgtttggttttgattaatttgattaaatgcttgatctttaaattgattgatttgattaacagcagcctgcttttcttcatcagttgcattaggtgtttgtttaaccgcttcaatacgcttcgccacttcagcagtgattttatctcgcgctgcttgtttttttactacgtcaacttgaacagcatcgatattattctctgccactgtcgcagcttggtctacttccgcatttgtgttagcttgtttaatactttcaatagcttgttgtctgtcttgatttaaagtattgatcgcagcatttttctcatcattcgttgcatctggtgtagcattgatttcagctaatttagcattataatgctgattgatttgtgctaatgctgcaggttttttaacaatatttggctgaatcgcattaattgcttttgtacctaattgttgcgcttgatctacttccgcatttgtatcagcttgatttatattattaattgccgttgctaactcttgatccacttgatttaaagccacttgcttttcttcagttgttgcatttgtgttttgattaatttcttgctttttagcagttgctaaatcatttaatacacctgtagcagtttgtttcttcgttacatgcggttgaactgcgccgatttgattgactgcatcgtctctaatactattgaccatcgcagtagtagacgtcacaccaatatcagttaatgctctatttttaagtgtattgacacgatttatcgcttcttgtttctcttctcgagtcgcgccaggtgtagcattgatatttgttatcgcctctcgcgctttatcatttacaacattgcgagcatccgttttaacttgtgttgccggttgaatcacaactatattttgtgtgccctgatcttttgcttgtgcaacttcttgattcgtatctgctgcattaatattttgtttcgctgtggctacagcttgatcaagtaattgttgtgctgcttgttgttcttcgagcgtcgcatcattattattaaatatcgtattatgttgcgtttccgcacttttatcgatggcattttttgcatctgtttttacctttgtagctggtgtaattgcttgtattccttgaatcgcatttgtcttcacttgttcaacattagcattggtattagcgtttaaaatgtttgtgtttgctgcagttacagcagcattcactttgtcaattgctgcttgtctttcttcttgagtcgcatcaggattagcattgatctctgcaatatgttgttgtgcatcatgtgatacggcatcccttgcagcttgcttaacaacagttacaggagcaattggattaatggcatttagaccatctcctttggcgttatcaacatcagcatttgttgttgcttgattgatttgttctaaagcatggttggttgcttgagttaattcgttcaatgctgcatctttctcttcctgagttgcttctctattattatttatttgttgtcttttcgttgctgttgcttggttaattgcatctcttgcagcttttttatgagttacttgaggaacaactgctccaatagtattgatgccattatttttagctgtttctacgtcagcatttgtagtagcattcgtaacattatcaatagcatctgtttcatccgtagctaattgatttattgcatcttgaatctcgtcttcagtagcatctggtgttgcattgataatttccctttgtttcgttgctttatcacgtattgcttttttagcatttggtttaacaaccggtgttgcagtatccccacttaatgtctgtataccttgatctttgattctagtaacgccatcatcagtcgtttggtcaccaatattaccaattatttcatctttatgttgctctataacttgaatcgcatcttgtttttcttcatctgttagttcatcattttgattaactaaatcttccatttgatttactttttggtttactgcattttcagcatcaacacttcgaattaaagtatgctgcatttgatttgctaatgcatcaatatctgcttgcgacacccttttatttaatggtacattattacggttttcatctaaaatcgtttgtgcacgtctttttaaactattaaaaatatctaatgatgcaaatgtataatcagcttgttgaatacgtctatcaacttcagcttgcaatgcgtctttattcattatgatatcgattgtatatggatttgtacttacagtatgactttcagcaggtgaattaataaaatcttgtgtatacgttttatatgttaatgtatcattaaatgttactgttcttggtgttggtacattattaacacgcagcttatactttaaatccaatattttatcaggcattagtcgtgccggcgagttacctgaacctccaccagtacttttaattgttatcactcgattcgccgcatcatacgtcacattaaaatcattcatatcaacacctgaattactgcttggaaaatctttagtcaatgagttattaacatattctaccccttcaggtaattgaactttatatacaaaatcatctgtattaaatgaagcaccgaagttaccattattctttaatgaagttgtgactgtaaattctttattattagtagctgtgggttccattgttcgtctttcaacatagacatgcgaaccagaatgaagtccgatagagtcaacaaagctatagtatttgtaaccatcttttagttgataaatgccacgcgcatctgttattgcgtcatttttaggtacaaattgaattttgagatttctcacattatcaggtactttaaataaacgcaaagttggaccgccttcaacagtcttttcagcaatcgtatcattagtatcagcatttttgataatgacatttgttgccccttgaccgtttttagtagtcattgtattaaattcaaagattaattcagaattcggatttactgttaatgttttctcgataccattaaaatcgccatggtcattcgtatcagttccatgtatacgacctaatgcaattacattgccttgcgcttgatagttcttattatctcctgaatcaaacatgctcgttcttaccattgcatgactaaacacccctactttaccaccattgattagtgtgaagcccggcaagttattaacaacgtttactgttggtacagaacggttggtacttggtctaataccattgtcatcaaatgatagcacttcattaggtgcattttgtcctgcattattggcattaggatcagttgttggcgtatacgtcgctgtatttccagctggcacagtgccattagccgctgcaaccgctggatctgctggagttgcattaggatctgcaggtgccgcacgtctacttctctttttcggtctattagatgcttgttcagcaattgcaactagctctggtttatcagaagaatgacgaacatcttcttgaatttcctttaaagttagatgtcctcctgaaccattttcatttgttttatttggtacatttaatgtggtattattcgaaactacatcattattattagcgtttgacactgtctcagttgctgttgtattgccatctgtatgattattgttttgtactgaaggcgtacttgattgcactgatgttggcgtagcttgatttgctatactaccattattatgattaaccaatgcttgattcgttgattgattagttgttgcagattgattaggtgtattctgcgcactatttgctaaacctctattattagcaacatttgtatcttgtgaatttacaggtgttgcttgattagtatcgctttgtacattattatccgtagttaaggcttgtgcaccatttgggtttgaaagtaataaaactgttccgattaaagtagagaatatgcctactttatacttcctaatactatatttatttttctttaacaaattcatttcattttcctcctggttgtctgttctctgctgtgttgtttagaattatgctaaaaatatacgctctctcatattatgtttatagctatattattttgtacaatattttaagttcactcaattttatcatcatcattttataaaataaagttttattttattacaatttagtttccgttttgtaattaaaatcttaataaaacataacaagaacgctttagattgttttgtaacagaaagcaattcataccaaaaaacaccaagcaaccgaaacgttacttggtgtcattacaaatgtaatattattttaaattatgtcactactttaaatactttttatttccaaaccttcatcgccccatgcgtgcatgccgccttcgacatttacggcatcaatgccatttgcctctaaatattctacaactttagcgcttcgaactccaccagcacatacaatataatatatttcatttttattaaatgaatttaaattatccggaatggtatccattggaattaactttgcattaggaatatatcccattgctgtttcttcatcagtacgaacatcaacaatttgaactggtttagattctaaaagtttgttttttaattcatctgtagtaattgacttcattttaaagtcctccttaaaacattatttagctacaatattgactaatttttgaggaacagcgatgactttcatgatgtctttaccttcaatactcgctttaacattgtcattagataaggcaatttcttgcatttcttcttttgatgtatctttagcaattttaattttagctctcaatttaccattaacttgaacaacgatttctacttcatcatctacaagtagtgcttcgtcataagttggccaaggttggtacgtaatagactcttcatgtcctaattttgaccataattcttcaccgatatgtggtgcaataggtgctaacattttaacgaagccttcaatgtaaggtttataaacttcatcaactttataacactcattaataaataccattaattgactaatagcagtattaaatcctaatgtttcaaagtcttctgttacctttttaacagtttggttataaactttatctaaagatttattatttatagttacaatttttgaactcaatgttccatcttcatttaccattaaacgccatacgcgatctaagaatcgacgagatccatctaatcctttttcactccatgcaattgcagcatctaaaggtcccataaacatttcgtaaagacgtaaagtatctgcaccatgagactgtactatatcatcagggttgattacatttcctttagatttactcatcttctcattaccttctcctaaaatcataccttggttaaataatttttggaaaggttctttagtaggtacgatacccaaatcataaaggactttatgccaaaatcttgcatataataagtgaagaaccgcatgttctactccaccgatatataaatcaacaggtaaccaatgttttaatttttcgggatctgctaacatattttcatttttaggatcgatgtaacgtaaataataccaacaactacctgcccattgtggcatcgtatttgtttcacgacgtcccttcatacctgttttttcatctacaacatttacaaatgaatcaatattagctagtggagactcaccagtccctgatggcttgatttcatctgtttcaggtaacaacaatggtagctcttcttcaggaacagttgtcattgttccatcttcccaatgaatgacaggaattggttcgccccaataacgctgacgactgaataaccaatctcttaatttgtaattaactttcttttcgccagcacctttttgctctaataattgaatagctttagtaattgccgcttcattttctaagccatcaagttcaccagaattaatatgtttaccttcaccagtgtatgctgcttcttcaacatttccaccttcaatgacttcaatgattggcaaatcaaactttttagcaaactcataatctctgtcatcatgcgctggtactgccataattgctccagtaccatatgttgataatacataatcagcaatccaaatttgtactttttcaccagataaaggattaattgcatatgcaccagtaaacacacctgatttatcttttgctaaatctgtacgttctaaatctgactttttagaagcttctgtttgataagcttttactttttctttatattcatcagttgtaattgaattaactaatgcatgttcaggacttaagactaagaatgatgcaccatagattgtatctggtctagtcgtaaatacttctacttttccttccgtattatctacatcaaatgaaactttggccccttcagaacgcccaatccaattgcgctgcatatcttttaaagactcaggccaatctaaatcatctaaatctgctaataattgatctgcatattctgtgattttaagtacccattgtttcatcggcttacgataaactggatgtccaccacgttcagagacaccatcaatcacttcttcgttagataaaactgttcctaatgctggacaccagttaactgcaacttcatcaacgtatgctaaacctttgttatataactgtatgaaaatccactgtgtccatttatagtattctggatctgttgtattaacttcacgatcccaatcataactgaaccctaattctttaatttgtcgtttaaaagtttggatatttttctttgtaaattcacgtgggtcgttgcctgtgtctaaagcatattgctctgctggtaatccgaatgcatcccaccccatcggatgtaacacattatatccttgcattctcttatatcttgaaatgatatctgttgctgtataaccctcaggatgtccaacatgtaaaccagcacctgatggatatggaaacatgtctaaagcataaaatttcttttgacctaagttatcatttgttttaaatgttttattttcgccccaatagtcttgccatttcttttcaatttgattgtggttgtaattcaacatatttcctcctattcaataaaaaaagacacctctaactattctatttacatagggacgacatttgccgcgttaccaccctatttcacaaaaattgtgcactcattttaatagtaagagatgtcattcattcaatttaaaattattacgatttacatttagtccttaacactagctctcagcatcactagctttctgtagaaaagctccaaacgaaattaaattatacaaattaatattatgttataacgacatttatttcaagtctataacgttaattctatttactcattatgcatctatttttttaggttgcgtattattctccttgaaaaccattaataatattaatgcaaatacaagtagtagcatcataccgataaacatcatgcgcatattaaacgcatcaactaatacaccaccaagaaatggaccgaatgcttttcctactgtagcagctgaattcacaaaaccttggtactgtccttgcttaccatctggcgctaactgattggctatagttggaactgctggccatacaaacatttctccaaaagttaaaataatcataccgacaacaaatattgtaaagttttcggcaaaactcgtgacaaagaacgacaacataaaaatgatgatgccgacaaacatttgtttctttaagtttccttttaacagatagagaatcggtttaattaatggttgtgctactaaaatcattattccgttaattgtccataaaacactatattgtgccattgaaatattaatagattgtgtaaatgatgcgattgtagactcccattgaatatacgcaacccaacaaattgcaaacattgcacaaattagtactaacgaaataaatcttgctttattctttttaccagtaatatctaaatgagttggatatttaactttcgcattaatttcaatattaaattgcgttaccgcgacaagcgcaaacacaacatacataataagattggctaaaaagatatagttaaagctaaattctgcgacaaagccgcccattgctgcgccgacagccacaccaatattttgcgctaagtatatcgcattaaacgtttgccttccgccattcggccacactgctccagccattgcgtatatcgcaggaataatcattccgccaccaaagcctaacattacaagccatacagcataccaaggccacccgtgaaagaaattaagtagcgttgtactacaaagacaagtgaaagttccaattaaaatcgtcttgtatccacctaatttatcaaatagtgaaccacctaataagtttccaataaccatgccaaatgaatttatcattagcactaaaccagcaacagttaaactttttccaagttcttgtttcatataaattgtatttaaaggccacaaaaaactggaaccagtaatatttaacgccatgccaattactagccaccagactgatttaggtatattcatatttcatagttcctctctcttttttgtcaaactataataaacactataacattaaaatatgttaaaatctgtacttagaactctttttttatagaaaggaaaatgacatatgggcaatcatttccaatacgcttttgaaaacaaacgttatcacacatggaattaccatttaaaaaataaatttggacaaaaaatatttaaagttgcattggatggcgggtttgactgtcctaaccgcgatggcactgtagcacatggtggatgtacattttgttctgctgcaggtagcggagactttgcaggtaatcgtgcagattcaatcgcagtacaatttaaagaaattaaggaaaagatgcatgagaaatggcacgaaggaaaatatattgcttattttcaggcatttacaaatacacatgcaccagttgaagtattaaaagaaaaattcgaacctgtacttaaagaaccgggtgttgtgggattatctattggtacgcgtcctgactgtctaccagacgatgttgtcgaatatttagcagatttgaatcaacgaacatacttatgggttgaattaggactacaaacaatccatcaatcaacatctgatttaatcaatcgtgcccatgatatgaaaacttattatgatggtgtggcaaaattacgtaagcataatatcaatgtatgtacacacatcattaatggcttacctggcgaagactatgacatgatgatggctactgccaaagaagttgcacaaatggatgtacaaggcattaaaattcatttacttcatttgttaaaaggtacaccgatggtaaaacaatacgataaaggtttattaacttttatgactcaagaagaatacacaaacctagttgtggaccaattagaagttattccccctgaaatgattgttcaccgaattaccggtgatggtccaatagatatcatggtcggtccaatgtggagtgttaataaatgggaagtattaaatggcatcgatgctgaattagcacgtagaaattcttatcaaggcttgcgttacaagtctaaggtgaagcaatgaaattagaacgtatactccctttttcaaaaacacttattaaacaacatataacaccagaaagtattgttgtagacgcaacttgcggtaacggcaatgacactttatttttagccgaacaagtaccagaaggacatgtttatggtttcgacattcaagatttagctttaaacaatacacgtgataaagttaaggatttcaatcatgtttctttaataaaagatggacatgaaaatattgaacatcatataaatgatgcacataaaggtcatattgatgcagccatctttaacctaggttatttgcctaaaggtgataaatctatcgtgacaaagcctgacacgacaattcaagctattaattcattgctatctttaatgtcaattgaaggtattattgtacttgttatatatcatggtcatagcgaaggacaaattgagaagcatgcattgcttgattacttgagtactttggatcaaaagcatgcgcaagttttgcaatatcaatttttaaaccaacgtaatcatgctccattcatttgtgccatagaaaaaatttcttaagcatttgctgcgctatactatttataatttaggatcgagtagtcaatatttgaaaaattaataacaacaacaaaaagaggttttcaacttaatgaaaacctctttttatgctattaaacttacacagcaataattgcgtttaaacttttttgcattgctgttgctctacttgcaatcgcatcactgatgaaattcaacaactctactttctcttgttgtaacttttcattgaaatgaataataactgttctttcatcgtcaacaggacgctctttgtaaatccattctaattcaactaaattattatacgttctagtacgcttatacggtttgacttcaacaaatctgtccatttccttaagcgtcatagaacctttttgccataaagttagtaaaattaaaatttcttctctagacattttgtactcgctttcaatctcactgaaaattgagttaatgtcacccaaaagtgtttctaattgcaaaatcccaaatacagtatcgttatttacttttttcatgctaaacatctcccaattaatgatcacatatttagccaccatacaagtattaaacaaacatcccaacaatcccaaaacttgtatgtgctaacttatgcttaaaactacaagtgtaaataaacttgctttctattcaattgtcaaagttgaataaaattaaataagtataaaaaccaataatcaatagagttaatatttagaaataagataatagtacataaaacaaatcactctattacatattaattttataatttatatacaaagaaaatatatcaatattaccattaaattgcaacaattctacatatatttcttcaaaaaagatacgcattgaatttttattacatataactctcatgaaaattgattaaactaaattaattagttagccttaaatttaacaaattaaatcaaaccgaatgaggctaaattggttatttttcaagatatgatttgtataaatcaaaacatttcttacaaatcaaatgtgtataaaatgtgatatacattctcaaccttaaaaaagttaaaaaaaagatgagcatctactgtctcatctttttagaatattaaatttctacaatttcgtcatcttcaacaataaagcccattgtattgacgctgttatttaagaaagtcagaatataacgcattacttcatcgcgttctggctcattgtgaacctcgtggtaaaaaccttgccaagctttaaaatataattcaggtgtttgatatttttctttaaactcatcaattgccctagtatcaacaattaaatccttcgttccatacattaatagtgttggcattggttgaatgtcatgaatatgagccatcgtatctttcatcgtctcattaattgtattataccaatgatacgttgctttttttaacattaaaccatcgttaactgtttcttcaacaatttctaaattacgtgttaaatcttttggttctacaccaacattaaaacgtgtgtcttttgatattttacctatatttgaaacaagtttatctttacgattttttccattcttttgaagttctagcataggagaaattaacatcatcccctcgattggcaattctactttttcaagtaaatttaataaaatcaaaccgccaagtcctacccctaatacataagtaggaattttatattcattagctatctttaaccagtctagcaaactttcgtgatacgtttgaaagttttcaatttgtcctttattagctcttgaagtttgaccttgaccaggcaaatctcccataatcacatgatagccatttcttcttaacatcgtaataacatatgcatatcttcccgtgtgttctaatatattatgagcaataacaacgacgcctttcgcatcattttcagcttcccacttccacattattatactgcccctttttcattaatcttcaataacacaattatagcaaattcactatgtagatttctatttatagtattattgttgtccatattattatatacaaatgaaatcaacatcaataatagtgtaattatacataattatttttgattgtttttgatgaaaacgctttctcgaatatttttttcatgctaaacttattgtaaacacaagggtttggaggagtagcaatggcactattaaagaatttttttatcggattatctaataatagttttttaaacaacgcagcaaaaaaagtgggcccacgtttgggtgccaataaagtcgttgccggaaatacaattccagagttaattaatacaatcgaatacttaaatgacaagaatatcgctgttacggtagacaatttaggggaatttgtcggtacagttgaagaaagtaatcatgctaaagaacaaattttaacaattatggacgcccttcatcaacatggcgtaaaagcacatatgtctgttaaattgagtcagttaggtgcagaattcgacttagaattagcttaccaaaatttaagagggattttacttaaagcaaatacttacaacaatatgcatataaatattgatactgaaaaatatgctagcctgcaacaaattgttcaagttttagatcgattaaaaggcgaatttagaaatgttggtactgtaattcaagcatatttatacgatagccatgaattagttgataagtaccaagatttacgattacgtttggttaaaggtgcatataaagaaaacgaatcaattgcatttcaatctaaggaagatgtagatgcaaattacatcaaaataattgaacaacgtttgttaaacgcacgcaatttcacttcaattgcaacacatgaccatcgcatcattaatcatgtaaaacaatttatgaaagaaaatcacattgaaaaagatcgtatggaattccaaatgctctatggttttagatcagagttagcagaagaaattgcaaatgaaggctataattttactatttatgtaccttatggcgatgattggtttgcgtattttatgagaagattagcagaacgcccacaaaacctatctctcgctgtaaaagaatttgtgaagcctgctggattaaaacgtgttggcataattgcagctttaggagctacagttatgttaggtttaagtacaattaaaaaattatgccgtaaatagagcatggcataaacaataatttaggagtctggaacaataatcaatgttctaggctcctaaatgttatattggcagttctgaatcatttataaatctttgattatgaactctcaacagcgctctatgcttttatagattttaataaattagccatttcaattgcacttactgctgcttcggcacctttattgccagctttcgtacctgctctttccacagcttgttcaatactttcagtcgttaaaataccaaatatgactggtacattagtttgatcatttactttagaaacacctttcgcgacttcattacaaacataatcataatgagacgtagcaccgcgaattacgcatcctaatgtaattactgcatcataatttcctgatgaggctaattttttagctactaaagggatttcaaacgcacccggaacaaatgctacatcaatattgtcttcattaacatcatgtcgaatcaaagtatcttttgcaccttcaagtaatcttccagtgataaaatcattaaatcgactaactacgattgcaacttttaaatcttttccaattaatttaccttcaaaattcatattaaagtcctcctatattaaatgacccatttttatttttttcgtttccatataatcatgattatgtaccgtttctggtacgataacttcaattctttctgcaatatcaatgccatattgttttaatccctcaaatttacttggattattacttaataaattgatatgttcgatgttaaaatattttaaaatctgtgcagcaatatgataatctcgcaaatcttcatcaaaacctaatgctaaatttgcagttactgtatcatatccttgctcaattaattcatatgcgcgtaatttgtttaacaatcctatgccacgaccttcttgaggtagataaataatcatgccgccatgttcattgatatacttcatagacgattcaagttgagcaccacaatcacaacgttgactatggaaaatatcgcctgtaaggcacgcagaatgtaagcgtacattttcatgttgtcgaattgcaccttttgtcagtacaactatctcttcatctgtgtaagtcgctttaaaaccatacatatcaaatgttccgaaatctgtaggcattttcacttttgccttaaattcaatttctggttctaattttttacgatattcaattaaatcatcaatcgtaatcatctttaattgatgtttttctttaaacttttgtaaatcttgtcctttcgccatcgtgccgtcatcgttcataatctcacaaatgacaccagcgggcttggcaccagtaagtttagctaaatcaacagccgcttctgtgtgtccatttctagctaatacgcctttatcttgtgctactaatggaaataaatgaccaggacgattaaaatcaaatgcctcgctactaggatcaatgagctttttggcagtcaatgtacgttcataagcgctaattcctgttgttgtatctacatgatcaatactcactgtaaattgcgtaccaaagatgtcggagttatcatcaaccatttgtaccaaatccaaacgttgtgcaatatctttagacactggtgcgcatattaatccccttgcttctttcgccataaaattaatggtattatcgtccatccattcagtgaccgctactaaatcaccttcattttcacgattctcatcatctactacaataattgtttctccattttttaaagccattaaagcactgtcaatattatcgaattgcatgctacccctcctaaaaaccaaatgctcttaatttatctacagataattggtctttatctttatttaaaatattttcaacatatttaaacaaaacgtctgtttctaaatgtactttatctcctaattttttggatgataaaatcgttgaacgcctcgtttctggaataagatgaatgtcaaaactgttatcatgtttgtcaaataccgttagacttacaccatccacagtaatagacccttgcttaactaactgattattaatatgttggctacattgaatcgtaataattttggcattggctgtttcatttatttttgaaactgttcctagttcatctacatgaccgaggacaaaatgtccaccaaacctaccgttaccactcatggcacgctctaaatttacttctgattgtcgcttaacatctgctaaataggttttattttcagtgcctttaattacttgaacagtaaaagatgtctgatcaaaatcaatcactgttaaacatgcaccattaacactgatggaatcaccaatatgcatatctgccgtaatcttatgtgcttcgatttcaatcgtcctgactgattgacgaatttgaacacttttaacgacacctatttcttcaacgatgccagtaaacatgcatcatcacttctttcgtaaagttaatttaacattttgatttaataactcggaatgaacaatttcaaattggttcgcatctggtatctcaatcacatcatttgtttgataaaattgataatttccagatccgccaattaatttcggggcataatagagaataaattcatctatataattagattggagaaattctgaagtagtggttggacctgcctcgactagcaaagttccaactcctcttttatataaattgtgaagaattgttgttaaatcacaagacttcaagtaaataatttcaatatgtgtttgattggttgttaaatttggattttcagtatatatccaaattggtgttgattcatcttgataaatttgctgattaaaatgaatattcccagacttagacaatattacttttatagggttttttccatcttgaatacgtgtagtatattgtggatcatctaattcaactgtacgtcttccagttaacactgcgtcgtgtcgatgtcttaacttatagacatcttgtttaacctctttgttagtaatccattgactttgtccattatcattcgcttgtttaccatctaaacttgcagatactttcactgtaatttgtggcagttgctttgcttttgctttaaaaaagtcttggtataattgtgatgcacgttcatcatcaacgcattcaacctcaataccgtgatcccgtaacgtatcatcaccatgtgtatctaacgaattgtcttttgttgcgtaaactactttagctatcttacaatcaattattttgttaacacagggtggtgttgaaccaaaatgactacatggctctaacgtaatataaatcgtcgcaccttcagcattttgttgtgccatatcaagtgcttgaacctccgcatgcttgtcaccttttctcaagtgtgcaccaataccaacaatcctaccttctttaactacaacagcgccaacgggtggattaacacctgtttgaccttgtaccatatttgcaagttgaatcgcataatccataaattgactcaaatgatcacctctataaacaaaaatcctcacatcatgaattaagatgcaaggagaaaaatttatcgttaaataagcctatttgtacacatttttacaaatacgctacattatctttgtcgataattaacattctttctcccatccagactttaactgtcggctctagaatctcactagatcagccactaatatgaaacatattagcaggtcgcaggctttatttactgccggttgggaatttcaccctgccccgaaagaattatatatgaaattgttatagattatttgagtacgtagtatgtcaactacatttaaaatgatactatatgttttctgaaaaaacaattaatgacgtttttaatttaatataatctgaatactataggcatctcattgatatgattcttactaacagacattaaaagcaaatcttcaattcttctctatagagcgttctctttattatcttctagttacaaattattgattgtcactgtgctgttgttgctcattcgattctaaagcatcatataattgagatactgtatgcgcaacttgttctactatcattttcacaccatttcgtagtttattaacaccgtttgtcatttgacctatcgcaatcatatttgttaatgttccaaaccttggactaataacttgattggtttcaggtatgatttgtatgcctcccattggatgtgcttgtacaatttgtctattttcaagatttttaattaattgatcatcttgatccaattcatttaaatgactttttgcacctgtcgcgttaatgacaacattatatatgtctactgattcttggtttttgtatgaaaaataatacaacttgccatcatgtttcacatcttctaaatcttttttcaaaattaaagacttattttctattaattcaataattagttcagcagttcttggaggcattggatttgaatttaattgaatcatctttgagtatttttgattaaattgatgttggtcttcaatacttaagctattccatatccaatttaaattctctttcaaatgttcaatcatactttggaaaatgcccatttctgttggacgcgctaaatcatacttcaaatctgcaatatgatttcctgtacgtctatgtactaattttttaaaatcaatgtcatattcagcacattcttttaaaaataaagaaactaaagtatcaagcggtgcattgccgaaatgatgtttttttatgtcatttaatttgtctttagttaagtacttgaatgtcacgtctatcattgtacctcttacacttggtaaatgagcagaacgactcgtcatagtaattggtaatttcggatgatgagcagcaacataacgaacaacatctaaactggcaaggcctgtaccaataatcgcaatatcgtccagttcatttacttcgtctaacgtattatatgttggataaggcgtagcaatatatccttttttaccctttaagttatatggatcatggtaggcaaatgtaccacatgttaaaaatacataatcgtacgcttgccatgattgttctgaatttgtagtacatatgtaataagttaaattcgtttcatcaatattagaatttgtataaatctcttgaactttattgtaattagttgatatatttggatatttttttgtgaacatagataaataagatttcatataatgtccgaatacaaatctcggtaaatatgcaggttcatcaaaattaaaatcagtttgttgtttataccacttccaaaattcagtctcatcatctaaatttaaactcatctttttcgaaggcatattaattagcagctcagaactatcattttgaaatggtacgccctgccccatatttactttatcatcgtataaatctatatctaattgattaaatttcgggtgcttaactaactctctcaatacacttacaccagcagttcccatgcctattattgctacacgcatatatcatccatccttttgtaattcaaaatattatatttaaactattacctaaaattatagcaatttggtatttttaataaaatttattaaggcaagctattatttcactttcacaaccattaaaccatttaaaacttttcatttaatatcaaatctagtgtttgtgttaaaatatttataccgaggtgaattaaattgaaatttatagcaaagatattaatctcattagtaattctatttatgatttttagtcgtaaaaacaaagcttcttaatcaatacccttgattacaaaataaattcaactaaggtgattggccatacactcagaatatggctaatcacctttttcaatgcaaaacaaagagtatattttgcaaaatcaatatctatatttatctttaatacccttttaatactaaaaccaaatttagattacatagtcatatcgtataatataccagagaaacatagacattcatctatatagatgatactctatttaacgtctaggaggtatgttatgacgtataaagaactagcaacatatttaaaagttttatcagattcaagcagattagaaatactagatttactttcttgtggagagttatgcgcttgtgatttgttagaacattttcaattctctcaacctacacttagctatcatatgaaagcattagtaaaaaccaacttagttacgacacgaaaaatcggaaataaacatttataccagcttaatcatgatctttttgagtccgtaattaataacttgtctaaggttcatacctctaaccaacgatgtatttgtcataaccttaagactggtgaatgctaatgatgacaactttagcaatactcatttttctagttactttaatatttgtattatggcaacctaaaggcctagacattggcattaccgcattaactggagcctttattgctgttattactggtgttgtaagtttttccgatgttttcgaagtaacaagtattgtatggaatgctacttttacttttgtctcagtcattcttatttcattaatattagataaagttggattattcgaatggtcagctattcacatgcttcatgcttcaaaaggcaatggtttaaaaatgttcgtttatatcatattattaggtgccattgttgctgcatttttcgcaaatgatggcgcagcgttaatcttaacgcctattgtattagcgatggttaaaaatattggatttaataagcgcgcaatatttccatttattattgcaagtggttttattgctgatacaacgtctttacctttaattgtaagtaatctagtgaatattatatctgccgattattttcatgtaggattcgttcgatattttagtagaatgtttatacctaatttattctcacttttagcaagtattatagtattgtggttatattttagaaaagctatacctaaaacgtttgatgataataatataaagcgtcctaaagatgctattaatgatttaaagctatttaaaatttcatggattgtgctagttatattacttttcggctatctaatcagtgaattcactaaaattccggtatcaattttcactggaatcattgcttttatatttctaatgttggctcgtaaatcaaatgctgtaaatattaaggaagtcattaagggcgcaccttggaatatagtattattttcaattggtatgtatatcgtcgtattcggcttaagaaatgctggcattactttaatattggctaaaatattagaatatatttccaattacggtctatttagcaccattttgggaatgggcttcatttcagcatttttatcatcaataatgaataatatgcctacagttttaatagatgcgattgctattggtcaatcaaatgtccatggcatgttaaaagaaggcctaatttatgcgaatgttatcggttctgatttaggtccaaaaattacaccgataggctctttagctacattactgtggttacacgtcttaacacaaaaagatgttaagatttcttggggcacatactttaaaactggtatcatcattacaattccagtactatttataaccctcatagggttgtatttaacacttatcatattttaattaattaggagattgttatgactaaaaaaacaatttattttatatgtacaggcaactcatgtcgaagtcaaatggctgaaggttgggctaaacaaatcttagcggaagattggaatgtatattctgctggtatcgaaacacacggtgttaatcccaaagcgatagaagctatgaaagaagtaggcattgatatatcaaatcatacatcagatttaatcgataataatattattaaaaattcaaatttagttgttacattatgtagtgatgcagacgtaaattgcccttctttaccaacaaatgttaaaaaggaacattggggatttgatgatcctgcaggcaaaccatggtcagagttccaacgtgtgagagatgaaattaaaatcgcaattgaaaatttcaaatcacgatgagagtaggacaaaaatgataaaaaacactaatgatttattatgcagtggctctttatcattagctataactaatgtgtacttaaaaataggaatacatgagtacaactcatgcataagaaatactaatttctaaagaaaaagtaattctttatcgatgtcctgccccaacttgcacatttttgtaagctgactttttgtcagcttctatgttggggccccgccaacttgcattgcctgtagaaattggtgttccaatttctctatgttgagaccccgccaacttgcacattattgtatgctgactttttgtcagcttctatgttggggccccgcttgcattggcggaattatcaatcaatatctttatttaataataaaaagacactttctatacaaaacaagatagaaagtgtctttttagtatgtccgagtcaaaaaatcaactcgtagcttatcaaattatttattcaaatgtttactgtcatctttatacacaaagtatttgaagtattttccttcagtcttcatgttcttataaaagtcagcgataattgttgcattactttctgcccacttaatatctgtagcatattgatgttctcctggattttttggattccatctcatactatacaatgtattttgatctgtgcttgataagaagtgcttatgaatgaaatcagcaccgcctgaaatagctttttcaggtgtatcccaaccatgctttttagcatattctgcacctgttttaattgggtctttatcaagggctcctactccatagaaattgtagtattttttgccatcaatttcgactccattagctaattcacttttaactgcgccggtttctaataatgcatgtgaaattaaataaacttcgttaacgtgcttgtctttagcagcttttaagaaatcatccgtatgtttcaataacattggtctatcgactaacatgcgtttaattctgtttttatcaattccttggtactttgataaatctaaaaattgatatttttgctttttattatcaataaatgtaccgctatccattgcacttttaatttctgttgcagatgcatctctccatgcatcattctttttatttgatacctgttgactcgtataattatttatttgtttctttgctgcatcgtttaatgtaacatttaacttttcaatcttaatgtctgatttaacatgtttgaaaaatatctgatcggatatcattgagaaaaataaaaatgagacaacagcaaatatgacaacaagtcctattattccaaaaatagaacctttcttgtgtttattcatatccacacctcttaggtcattgttgttatacattcagtttgactacgataataaagtttaacattattaaaaccgtttaacaattttatctatgcattgttacatattcataaataaacagtaatgtaaatgaaacgttttaaacgatttatcaacattactttacgttgatctacgaatcataaatgttttatcttcttgtataacctttgaaaacctttatatcaataatcttattattcatgtattaaaaaacaaaaaattctcttgttcgtttacttagtttcttttttataatccatcataataaaacttgctgcatttgatctatttttataatagtactgatttaaatcaatcgtaccttcaatttgaccatcacgatacatcatttcattagtgaagttatttatcatcacgaaatcagcgcgatctctaataacatctaaatcgtcgtttcgtgcaaaaaaatgttctaaatttaaatgtgcgtaatccattgttacctcccgattacaaattttgttctatctactatttagcaaagtaataatacatcatatcacattaaattaattacttatgtcttatatttaacacttaatttagcgattacgcaaatgtatgatttttctaaatattttattctaactttatccggaaatatttgttatacgtataacttggagaatgactacttgaaatttaatgacgtatacaacaaacaccacaaaatcatacaccatcttttaaaaaaatataatattagctataattatgatgagtattatcaactactcttgataaaaatgtggcaattgagtcagatatataaaccctcaagcaagcaatctttatcctcttttttattcactcgattaaatttttaccttatcgatttattcagacaacaaaatcaattaaaagatgtcattttatgtgagaataattcaccaacattaactgaacaaccaacatactttaatgaacatgaccttcgtttacaagatatcttcaagtttttaaatcatagagaaagactatggctcaaactataccttgaaggatacaagcaatttgaaattgctgaaatcatgtcattatcgctttcaacgattaaattaattaagacatccgttaagcgtaaatgccaacataattttaattagtttattgtgaaatttcggtcgatgtgttaataatgttgaaacaccctaacatctccatataaatttattttaaccattaaattaacaacttattatacgaggagtactatatttgcaagacaattctactaaatatctactttatatccaaactgctacttcaaaccatctcgaaacaaattgtgtctttttacattgcgattacattcttgaagttccaattaacaaactcgtttcatattatgcaaaattgcatttatcatcacaaagtgtgctaattgagactgcaaaaaacatactaaatattaataaactggttcccatttacatcaatgcaaaaactatactttttccgttaaaacataaacgtgcaccgatacaaatttatatcaatgcacattatattgttggtatgactgccatagagaattcaacattaatacattttcaagaaggcattcagctagaagttgatgagccattttctctagtttcaaaaaaatgtcatgaaagtctagctttgaagcacttcattgaaaatactatttcgaattaaatttaatttctaaaagtttcttagtaaagtatgatgtcacaatttttataaaatatatgctaacaatcattaataaaatcgctccaataattgttaaaataacaacagttgtagataaatctaccttaggactaacgaaaaattgtacgccagatagacttgtaattagcccaaataaaaacaagcctaataaagcaacataagcaaacatcatcactactaatgtaacaaacatactataactttttgtttctttatttcgaaatacatgttgtcttaagtaagcattagcaaaggtaacaggcttatttaagttaacgctgttatcatcagatatagaagacaatcgttgatctaatgcttgtttctccttcttgttcaaaaaccataattgctttttaacttttttatcaaatgatgctttattcataattaaggatttctctcctttataatattgacgtaatttttgacattagcgtcaattgaaagtgtattttatatattttacagaaatatatgtatcaaatctacaaaaatccatattacaatttcatttatggtgatttgacgctaaaatacagtctgttaaattttacaaactaatgctttttaggtaagtacaatgttaaattttaatcgtatatatgtttcatatataatgaacctagccataatcatattgccttcaaaattaatcttaaaaaatgaaaagaaaggatttagcatgcaaaaattcaaagactttttttacgatgatttatcggttacacgaggaaattattttttaactttaatggcagcattttttattactatcattctatttatcggcataggtgccagtgaagtacatttgctttatggtatgctgattgtattagtaggtttaattctattgaggctattcaaaatcaatttattctcttttaaaaaattaacattgtctcaagttatttatattataggcggtgcactattaatttatggattagataatctttatttatattttcatgacgtaccggcaaatgaacaacaattagagcaagaaatacgaaatacaccattctatatttctattctcactgttaccatcatccccgctattgtggaagaaattgtttttcgcggtatgataataagggttatattcagaaaacacttgtttttagggttacttgtgtctagtttagtttttgcatcattacacgaatctgacacttggattggttatttaccttacttatattctggtttgatttttggtctaatatatttaaaaacaaagcgattagaagtagttattttaatgcacttcttaaataacttgttagctctgctctttataatatggggataatactagttgatataatacacaatgaatttccctcaacatgttattcacaaaactatatgcaatacaatttaataatatacaagcttttaaaacaataaaaaaccttgtataattagcttaattttcataaaaattaaacatcatactttattttaggagaattaatatgttttcgaggaataacaatatttttgttgatgatttgtctgtaacaaaggacaattatttaattgcagttttaaaaatgttagtcatttttttagttattaattatggaacagacgtcagttatgaccatgagtatattgggctattcattatattactaggtgttgtatttcttaaagttttaaatatcaatttattatctttcaaaaaattaaaattcactcatatgctttatattatatttggatttttgttgatgtatggattagataatttatatgatatgtttgcaccacctacattaaatgaaacgttgatagatgaagagtttgaagatgtaccttatcacttggctctgattagtattgccattattccacctatcacggaagaaattatctgtcgtggattgattatacgagttttatttagaaatcatctttttttaggactaattgtatcaagcatattcttcgcactaatacatgaatctgatacactgattggttatctaccgtatttttattcaggtttaatttttggctatacttacttaaaaacaaaacgtttagaggtaccgattttaatacattttatcaataacctcttagccatttaacaataaaatcattaattattttgatatttacatgatgacaccaaagcttttacaaagtattaataggtgcctttccaaatgttattgcatatttacattctgcaattatataaaggtaacaaagcatattaagtttagctatgaaaaaatctatgacgatagaatttttcatagctattttttatagttattgagcctatcccagaccctctacactgttatattaccagtcattgaccgaacgaaaatgcccttattataagctatttcaattctagtcggggccccaacacagagaatttcgaaaagaaattctacaaacaatgagagttggatgaggacctcaacatagagaaattgaatcccaaatttctacagacaatgaaatacatattaattcaatattgactcgaacatgaaaaacccccataagcacaatgcctatgagggtttaaatatatttatatattatagaatagaaagacctgaagattgaatatctttcgcaaagcctttaactgtatctactgataattcgttaatatcgcgacctaagtttgtattcacttttttcacaacatctgctgggcatgtaataatatctgcaccaatttcatcagcttgaatcacattgaataattcgcggcaacttgcccataataatttaacgccgtctttactatgcgtaacttttacagcctctttcattaatggtaatggatctacgcctgtatctgcaatacgtcctgcaaatactgaaacatatgttggcacaccttcagttactgcttcagttatttctttaacttgttcaattgtataaacagccgtaacgtttaatctcacattgtcagctgaaagttttttaattaaaggaatcgttgattcaccttttgtatttacaataggaattttaacaaatacattttcgccatattgttttaaaattgctgcttctttttccatagtttctaaatcgtctgcaaatacttcaaatgaaattgaagcatctggaatttctttcacagcttcttcagcaaaagctttgtaatctgttacgcccgctttcgccattaaactaggatttgttgtaaaaccatccacttgtttgtttttataagctgctttcatttcttcaatatctgcaccgtccgcaaatacttctacatttagtttagccatataatatagcctccttgattcttattaaaattttaacaacatctgcatgtctttttcttacaaccatttgtaaaaaatgatttttatttctttgttatataaaacatttatatcacgcttttataatatatagctaattttttgcctatattttttaaaaatgactttagcaacattgtgtcaacaaggtaattaaactattgttttatgattgtttatgatacgatatgtaaatgataaccatccaggaggtctagcatgtctcgttcaaaaaaatacttttacttatctagcttaatgattattttaagctttttctttaatacaaataacgttttcctaagtggactttttaattcttttattaaattaatacttttctgcagtgttattaactcaattgtattaattttatctataatttttgcagatcgttcaattaaatcactaaagcctgatgcagattggattagaattgcgagtaaaagtttgccttggattattctaatcgttattttagtacatatcttttcaattgttcgtacattcggttttatttaaaaaagataaaatgtcaatgtagtcttaatacaaaacaatacaatgtttcatgccataataagtaaatcaatttgatgacgttgttgcgtataaaaaatattagattttcgaaatcataactatgcatctaatcgctatagttatacaacaagatataacatataatgaggtttgataatgcatcgacaatttttgtcgtcgcgttgccaaaacctcttttttaaattcaaactacttcttttcgaggtgaaccaaatgcaatatgtatatatttttatcggtggtgctttaggcgctttattacgttacctcatttcttttctgaatactgacggaggttttccaatcggaacactggtagccaatttgactggtgcctttgtaatgggattactaacagccttaacaattgcatttttttcaaaccatccgaccctaaaaaaagctattacgactggttttcttggtgctttaacgactttttcaacatttcaattagaattaatacatatgtttgatcatcaacaatttataactttactactatatgctataacaagttatgtctttggtattttgttatgttacgtcggtataaaactaggtggtggtttatcatgatatcaatcattttagtcatgattggcggcggtttcggtgcaattgctagaagtgccattactgattattttaatcataaatttacttcaaagttacctatcgcaacattgatagtaaatatagttggtagttttttaattggattaactataggcttatcaatttcaatctcatggttccctgcgttctttgttaccggttttttaggtggcttaacaacattctcaacgttagccaaggaacttacactaatgatgacgccaaaatttaatattaacctttttctcaattattcacttttacaattcatcattggatttatagcttgttatattggctatcatatttaaaaataaaatgcttcattcagcaaataggtaaattacgacaccttcctgaacgaagcattttttaattttcatgcaaattttttagcaccatataatgcctatcaaaataaaacaatctttgttgccgtttaaataatgtgaatgtcaataaattctctaaactagtcgaaaataaaaacgttaagcaatattgctattacctaacgttgacaattcatctaaccttttcatcagttgagcgattttaatctagccttcaaaagtttttggatcaggtccaattctcttatcttgatttaaaccatcaattcgcttcatttgttcatctgataattcgaaatcaaatatttggaagttttcagagattctgtttggtgtcaccgatttagggattgtaaccacaccatgttgcacattccatcttaaaacaacttgggcaggtgactttcctaattcttgagcaatgtctttaattgcctcatcatttaaaatttgtgcattcatcaatggtgaccaagattccatcacgatatgttgtgctgccaaatataatttcaatttatgttgcgttaaatatggatgatattcaacctgattaattacaggtttaattgacacttgtgccaataaagcttccaaatgttcaggttcaaaattgctgacacctatatttttaactttattatttttatataaatcttccatacctttccatgtatcaaccattacggcttcgttcgtacctggccaatgaactagatataaatctaagtattttaaacctaatctagataaactagcttcgtaggcagctgctacattttcacgaccaaaatcctcaaaatataattttgaagtaataaataagtcttctctagcaataccagttgattccaatccggcacgaatgccagcacctacttgttcttcattcccataaacttttgcggtatcaatactacgacatccttgttcaatggcatacttaacactttccatgcaattttcatcattttccacgcgaaatgtccctaaaccaatttgtggcatcgtgtttccattataaaatgttttaacctccataaatatcgcctcacctttttgatgtattataccctgttatcataacaaatctgagttgaatacatgataaaaaacacttatagcaatcaaccactaaaattatagtaatatctctcaaatactaatcaaaatgtaaaagtaattctgtttaatttatgacaaactaaaaaagccgaagtaacaacatatagtcatcacttcagcctaacatttaattgaatgattcaattttatccatcatttgttgtaagtcttccacgttgtattgaatacgaccatggaatacaaatttgttaaagaactcgtctaattgttcagcaccgacaagcactttgacagcactattttgattataatttgaaatcgttacatcgccttcatttttaggattaaagtataaaattgaagtcggtgtatatttagcacctaattctttttgtaagtcttcagccaattgtttaatcgcctcaatttgatctgaataatttacaaatgataatgaacgtttgtcatcattttgatccatcacaatagtttgcggtctagatttatctaaatccaatgtatcaaatacttgttccataggtggtaaatctttaaattgaccgccacttataccattataaacatgaccttttaacaattgagaatcaataatataaagaccagttcttgttaatactaaatgactaattcgttcaatattattaaagccatcctttggtaaaaagatatttgccataatgtgcatatcttctggtcgaattcgtttttctttaactaatctttcacgaataccaattaatctcatgtccgttacatattcactatgatttttcgagaacaattttaatgcgtcaatctcacgatcttttgtactaaccatgtgattataatcttcttgttgttttgtaattgtctttttattttgaatacgctctttctctaaagcttcttcatgagactttttaatgttttgttcttgttgttcatacttttcttctgtttgtcgcttaacttttttcttactacctaaggcaactaagaaaaggacaaaaaagattaatgcaatgactactgcaataatgagtccaatgactaccggtgaagataaatccatcacaacaacgctcctttttaatatatgaataactttaattataatagaaaagctaaagattttcgatacatattatcatttatataccgaaaatcttttatttagctatattcaattcattttattattttactgcgtcttttaattcttccactttgtctaatttttcccatgggaataagacatctgtacgtccaaaatgaccataagcagcagtttgtttgtaaatcggttgtttcaaatcaagcattttaataatacctgcaggtcttaggtcaaagtgttttctaaccgcttcgacaagttgtccttcagaaactttacctgttccaaatgtatcaattgcaattgacactggttctgcaacaccaatcgcatatgccaattgtacttcacattgatctgctaaacctgctgcaacaatatttttagccacataacgtgcagcgtatgcagctgaacggtctacttttgtagggtccttaccactgaagcatccgccaccatgacgtgcatagccaccgtacgtatcaacaatgattttacgtcctgttaatcctgcatcaccttgaggtccaccgattacaaagcgtcctgtaggattgatgtagaatttagtttgttcattaatcaagttttctggaacagttggataaatgacatgagctttgatgtcttcttgaatttgttcaagtgtcacatcctcagcatgttgtgttgatacgacaatcgtatcaatacgtacagggttatcattttcatcatattcaacagtgacctgaactttaccgtctggtcgtaaataatttaacgtaccatctttacgcacatctgataaacgttttgccaattgatgtgataaataaattgctagaggcatgtacgtttctgtttcattcgttgcgtaaccaaacattaaaccttggtcacctgcacctgttgcttcaatttcttcttcgctatctttatcacgatactctaatgctttatccacgccttgtgcaatgtcaggtgattgttcatcaatcgcagttaaaattgccattgtttcataatcataaccatattttgctcttgtgtatccaatttctttgattgtttctctaacaactttcggaatatcaacatatgttgttgtagaaatttcgccggcgatcaatgccatacctgttgtaacagttgtttcacaagctacacgtgcatttgggtcgtcttttaaaatagcatctaatattgcatctgacacttggtcagcgattttatctgggtgtccttctgtaacagactctgaagtaaataatcgtttgttatttaacatagtttgctcctttaaatttatattacgaaaattctctctctgtgagctaaataaaaaagaccttctaactattaatatagagagaaggcctaatacgtccattcgctcttatcgttcagacctatttgtctgcaaacggtttggcacctttcttttataaaaaagaggttgctgggtttcattgggtccatgtccctccaccactcaggataagagaatccgttaaaaataatagtacctaattaatgaattaatgtcaatttttcacaaataaatttacagtaaaatattgtagattaattatgttaatgtgttatactaattaaatgtaaaggcttacatttaaattatcgctttggagggatttaggatgtcagtagacacatacactgaaacaactaaaattgacaaattactgaaaaaaccaacgtcacattttcaactttcgacgacacaactttataataaaatcttagacaataacgaaggggtattaacagaacttggtgctgttaatgcaagtactggaaaatatactggtcgttcgcctaaagacaaattttttgtctctgaaccttcatatagagataacattgattggggagaaattaatcaacctatcgatgaagaaactttcttgaagttataccataaagtactagactatttagataaaaaagatgaattatacgtatttaaaggctacgctggtagcgataaagatacaatgttaaaacttacagtcatcaatgaattagcatggcataatttatttgctaaaaatatgtttattagacctgaatcaaaagaagaagctacaaagattaaacctaacttcactatcgtttctgccccacattttaaagcagatccagaagttgatggtactaaatctgaaacctttgtcattatttcatttaaacacaaagtcattttaatcggcggtactgaatatgctggtgaaatgaaaaaaggtatcttctctgtaatgaattatctcttaccgatgcaagatattatgagcatgcattgctcagcaaacgttggtgaaaaaggcgatgttgcattattctttggtctatctggcacaggtaaaacaaccttatcggctgacccacaccgtaaactaatcggtgatgatgaacacggctggaataaaaacggggtctttaatatcgaaggtggctgctatgcaaaagcaattaatctttccaaagaaaaagaaccacagatttttgacgcaatcaaatatggtgcaatcctagaaaacacggttgtttcagaagatggttcagtggactttgaagataatcgttatacagaaaatacacgtgcggcttatccaattaatcacattgacaatattgtagtaccatcaaaagcagcacatccaaatacaattattttcttaactgcggatgcatttggtgttattccaccgatttcaaagttaaataaagaccaagcaatgtatcatttcttgagtggtttcacttctaaattagctggtacagagcgtggtgtgacagaacctgaaccatcattctcaacatgtttcggcgcaccgttcttcccgttacaccctactgtttacgctgatttattaggtgaacttatcgatttacatgatgttgatgtttatcttgttaatactggatggactggcggaaaatatggtgtaggacgtagaatcagcttacattacacacgtcaaatggtaaaccaagcgatttctggtaaattgaaaaatgcagaatatacaaaagatagtacatttggtttaagcattcctgtagaaattgaagatgtaccgaaaacaattttaaatccaattaatgcttggagcgacaaagagaaatataaagcacaagcagaagatttaattcaacgttttgaaaagaacttcgaaaaatttggtgaaaaagttgaacatattgctgaaaaaggtagcttcaacaaataaatttgcatactaattaaagagccaaccgctgttatattttaacaatggttggctcctcttattttatatggtaagagtttataggcaattttattacaacaatgcacatttaaggtgaccttcatgccaaactcgcatcactcattcaatggaagcagcacgtcttcacataaagtaccgatcccttacgctatgcatgttgccccactttgcattaaataccgattcctcattcaacgtatatcacacatcttcaaagattgatagttcccatgtgcacaccacgtttcatactacctatgcaactcaacttggttcataaactctttaatataagtcaatgtttcaaccatcgctggtggtcttggcacatgtccttctgccatttgataaaaagtttcatgcgtggcaccttttaactctagttgatccgctaaataatacgcatgatgaataccaacttgctggtctttccctccatgtacaattaatattggtggactgttttcattaatgtttggaatcgcttggcgtgcctcatatgctgctcgatcttttttcggatgaccaatcattctacgtaacatccctcttaaatcaacgcgctcttcatacatcaaatcaatatctgagactccaccccagatgatataactatttacaggtaagtcttgaaatgttaacaacccttgtagtccacctcttgaaaaaccaaccatatgaataaaagcttgcggatatttatcatgtagcaatcttaatagttgcgtcacatcatttaaatcgccacgataaaattcatctttaccttcactgccattgttacctcggtagtatggcccaatcactaaagtttgactatctgaaaattgcattaatctacctgcgcgcacacgtcctacttggcctttgccacctcgcaaatatactacaatgcgttttacttcatgatgtggtgtcatcattaaagcttttacttgtaaatcatctgacaaatatgtaatttcttcgaattgatgcgtaaaagattcaattggcattcgtttacgtttgataaaatccaagtgattgcaccctctctacgcattttaaaatggtactatcttgcagtaagaaactccgttgtgcgagttcaatatcattgatacagttaaacaacactggccctgctgtttctaaataatcgttcttgcttaccaatgattcaacttcgataaaatatacatcttttacgaaatcagtttgatcatgtgtttcaatggtatattgtgctatgtaatgaatatttttaactttggcgcctgtttcttcatataattcacgggtaactgcttcagcactactttccccgcgttcccttttaccaccaggaaattcaataccccgtaaattatgtttggtaaaaagcaattgatttttaaacgttggaatagctagcacatgattgccatctgctatctcattatcctttttaaatgtcaaattaacttgacgattatctttatccctaaacttcacgcgcatcacatccctacattgtatgttaatataatagttaattactatcgttggaggcattaattatgaaaaagatattcttggcaatgattcatttttatcaacgtttcatttcgccactcactccaccaacttgtcgtttttatccaacatgttcagagtacactagagaagcgattcaataccacggtgctttcaaaggcctttatttaggcatccgtcgtattttaaaatgtcatccgcttcataaaggtggctttgaccctgttccgttaaaaaaagacaagtcagcaagcaagcattcacataaacataaccattaatatggttgtaattgagttatatccactaaaggggggcgaaattcaagtcgcccctcttttaatatgcctgaatacgccaccacatcttgttcaaaataataacctgctggtgtaacatctcctggataatcacctttacgagcaagcatcgctgtaaaataacgacttaaaccatattcgtacatgccgccaataaccacttttacaccatgacttttcaaagtatcaattgccgtttgcactttatcaatgccacctagacgaaatggttttaatacgacaactttcacattgtataattctatcaaattaattatggccgacagtgacgtcgccttttcatcaagagcaattggaggtattgttccatccactacttcatcaagcatggagatatctttaaatggctcttcgatataaagaacatgttcacgcgctaataactgtaactgtgtaaaatcttgacgatccaaggactcatttgcatctataaccaattgaaagtgaaagtctaattcccgtaacactctaatttgatgcatgatttgaggcgtccattttaatttaattctgggcggctttgttgctttcaatgactctagttgtttatttgataagccgctcgctgtcgctccatatactactgaaaatgaaggcagtacatgaaacatttgatacaatgccatgacaatagttgcccttgcagcaggcgtattttccattgaatctactaattttagtgctgcttcatacgtttcaaatgatttatttctattatcttcgaaccattgctcaattacatgtttcactgaagcaattgtttcatgatcataccaatctgtttgaaaagcgttacattccccgaaatatgcatttcctttatcatcaatcaattcgataaacaaacaatcacgatgcgttaaagtgactttcggtgttacaatttgtgacttaaatggctcactatatttataaaaatgcaaagctgtcaacttcatcaaatcatcctctatacaacttatttctttgtactttacctgttgatgtataaggtaaagtatcaaccttttcaaagtgtttcggtactttatatttcgctaaatgttgtgataaatatgcaatcaattgtgcctttgaaatgttactttcactgacaaaatataatttaggtacttgtccccaagtatcatcaggatgccctacacatactgcgtcaatgatacctggaaattgcttcgctaccgtttcaatttgatatggataaatattttcaccgccactaataattaaatctttacgtcggtcataaatcatgacataaccttcatgatctatttcagcaatgtcacccgtattaaaataaccattttcaaacgtactcgttaaatctgttggatacaaatatccattcatcacattggcgcctttaatcattaattctccatgaccttctttattaggatttttaatttttacgtcaacattggcacttggcatccctacagtgtcaggacgtgcatgcaacatttccggtgttgctgttaaaaattgcgaacatgtctcagtcataccaaatgaattataaattggcaggttatattgtaatgccgtctctatcatagtggcagataatttagcaccgccgagtaatattttttgtaaatcataaggttcatgtaaaccttgttgcataagccaatttaaagtttgtggcacaagcgaaatgtgtgtgatgcgttcattttttatcatcgttaaaatttgttcggcattgaatttatcaacaatgcgcacagtaaacccttcaatagcagctcttaaaagtacactgagacccgaaatatgataaatcggcaagacagatagccaattagtatcacgatcaaatcccaagctctctttacatccgattgcactggcataatgattacgaaacgtttgtggcaccgctttttgagggccagttgtccctgatgtaaacataatcgatgcaatgtcatctaaattaaatgatgtatttaatatgttggacggcgaacctttcggcaccacagtttcattcgatgtatcatattggatacccattgccttgtccaacaaaccgttcattgtaatatccgttccagcgaattcaatatcatccaacgatacaatttgaaaccctcgcaattccagtggcaaggtacaaaaaatcaattgtacatcgattgacctcatctgattcttcatctcattaggtgtcaaccttgtattaatcatcgcaatttcaatatttgccaaccaacatgcatgtattaaaatgattgattgaatcgaattatctatgtatagcccaacacgagattgttgataagccttgagtcttttagccaatagactcgcttcacagtataaattttgataagtataagattcttgaccgtctgttatcgcaatatgatgtccattttgttgtgcttgtttatataaccaaaagtccatgcgctattcctccaaaatcatttacattataattataacgattttatgacattctagcagtggttatgtttaaaaatataaaaaagtagacgaattgattcattgatatgattgttataatgctcaatacatatcgttatatcattcgtctactattatcagttatttttatttaattttagtgtcattctgtcattttgatgtggtgatttacccattgttgccacatcatctgcaatgtcaattggtatacgattaatgtcttgtaatgcacttaaatggaatacttcatcatctaaattttcaatgagatatacataatatgttatcttatcctttttatattttaacgttttccaaaagtccggcttgcaattcaatacattatccggaatatattcaataaataagtaacgtttgctgcctactttgtctacgaaatattttacagtacctttttctatacctcttatatgtgcatagtctgctgaaaagtaaatactacctattgtttcattatgttgttgtatttcaaatcgttggcctactattttattatttgtgtcacaactacttaaaaaaatcagtagatatagcattaaacatattttcatccccttgaattttaaaaactttttcaaaagcaacacctctaaagataaatacaatatattataacaaatagaaattattattttgttaaattatgttgtcatgttcgtgtcatttttagtcgtaatacaactttacaattattaaattaacacttctacaatccaaaaatatttttaaagttttgaaaaattaaagtatttccactactaatttggtaaaatatgattatgtgatatagtgaaagcgttttacacttaataactccctcttaaatgcatccaggttttatgtagtaaatcatgaaaataacatataaatatagaggagatttacctttgaatacagagaacaacaagaatcaaaaccaatctgctaaaaattctgaaagacgtggcatgttaaaaggatgcggcggttgccttatttcttttattttattaattatcttattatcagcctgttcaatgatgtttagtaataatgacaattccactactaatcaatcatcaaaaacgcaattaactcaaaaagacgaagataaaagtgaaaatatgcctgaagaaaaatcagaatcagaaacagataaggatttacaatcaaccgaagaagtacccgcaaatgaaaatactgaaaataatcaacatgaaattgatgaaataacaacaaaagatcaatcagatgatgaaattaacacaccaaacgttgcagaagaagaatcacaagatgacttgaaagatgatttaaatgaaaagcaacaaccaagtgatcatcatcaatccactcaacctaagacttcaccatcaactgaaacaaacaagcaacaatcatttgctaattgtaagcaacttagacaagtatatccgaatggtgtcactgccgatcatccagcatatcgaccacatttagatagagataaagataaacgtgcatgtgaacctgataaatattaaacaacaagcgaattgaattcaaattgtatttagctttatgcactaatcacatagtaaataatgagggagattttttaggcatgagcaatcaattcaaaagcgaagaagagcgaagacaatgggaacaattccaagctttccaaaatcaacaaaaccaacagaatcagcaatacggacaaaagaaatctaaaaaaggatggttctggggctgtggtggttgtctagtattatttattttaattatcatcggtatttcagcttgtacagctggtattacaggtaaccttggcggaaatagttctaaagaaacgaacaaaacccataaaatcggtgaaactgttaaaaatggcgaccttgaagtcactgtaaattcagtggaaactatgaaatctgtaggaccatctcttgcaccaacaaacgctaaaggtatatttgtcgttgctgatgtgacgattaaaaacaaaggtaaagaagcattaacaattgatagttcaatgtttaagctaaaatccggtgataaaacatttgaagcagataatacaggttcaatgtctgctaatcaaagtgacaatggtagtatagaaaattcatttttcttacagcgtataaatcctgatagcactgctcaaggtaaaattgttttcgatgtgtcagaaaacatagccaacgcaaaagataaaaaattagaagttatttctagtttatttagcgtcaagaagattacatttgatttatccgatgctaaaaaaacatcaaaagctaaaaaagacaagcaagatacagaagtagctgttgcgagttcaaatagcgataatgtaagttatgaagcttcggctactacacctgctacaacttctagtgaggatagtgattctgaagatagcgaaaagtctaataaagatgaggataagcagaatgcgtctaaaagtgataaatctagtgtagaaaaaagtgaatctaatgaggaaactactcctgtagagcccatgcgccagagcaaacctaccactagtgaagcaccacctagtcaaaatattcacaatgaagatagcatgtacgacgcttcaacagaataaaatttcagggtagcttggctacccttcttttacggaaaaattaattatacataatcaaatcaaggagataaaaaaatgaaattcaaagctatcgttgcaatcacattatcattgtcactattaactgcctgtggtgctaatcaacataaagaaaatagtagtaaatcaaatgacactaataaaaagacgcaacaaactgacaacactacacagtcaaatacagaaaagcaaatgacaccacaagaagccgaagatatcgttcgaaacgattacaaagcaagaggtgttaatgaatatcaaacattaaattataaaacaaatcttgaacgaagtaatgaacatgaatattatgttgaacatttagtccgcgatgcagttggtacacctttaaaacgttgcgctattgttaatcgacacaatggtacgattattaatatttttgatgatatgtcagaaaaagataaagaagaatttgaagcatttaaaaagagaagccctaaatacaacccaggtatgaatgatcaagctgaaatggataatgagtcggaagacattcaacatcatgatattgacaataacaaagccattcaaaatgatacaccagatcaaaaagtcgatgataaaaacgataaaaatgctgttaataaagaagaaaaacacgataaccgtgaaaataattcagcagaaactaaagttaaataagtgtatactttgattaatcgtaatttttaggagaaccgctatgataacatttgaaaatatacaacaacttgaaaaatacaccttaatgactatgcatggtctttttaatcaacttaaactcggtattatttcaatcgacaatgcagagcattcgctctttacaccttatatgatggaaacactctcttcccttgatgtgaaaaccgacattatcgatttaattcacaaagggacagagttagaagactttgcagcatttaatttatcaattgatgatacagttacagtctgtttacaaagaactgaagaactattaaaacaatacaaaaatgtagaattcaatgacaaaatattaatcaattggcgcattatgcaagagtaatagacatataaaagtcgaacgtaactaagtggatattgattttattctttctaaattacaagtatttcattttataaagtttgaaaagaggtatattgaaatggagaaaaacgaatatacagctaaatataatgaatatagtcaattattagacgctacttactcgcaagctgtagcataccttttaaataaatatggcgctgtaaccgatgactattataaggaaaaatcatacacacgatttttaaatggagaaatcaaaagtatttcaaaaggaaaatacactagagctagcgaaggattatattgtcatcacataagcgaagacaaattccaaaacttatctgacctaagattcatttccgaatttaagtactcatataattatcaaaagaaagaaaacttagtttactgcgatttaatcgagcatttaattttacatgcaattattacaaaagaatccaaaggccaatttggcgtagctggattatgtcaaatgatcaaaccaacagtcattgattggtacattggcgaatataatccaaaaccagcatggatgcaagccaccaaagcacgtgccaatctacctggaatattagtagagaaattactcattaaaattgacgatatgttaaaaggaatagaaatatatgatttccttgagtctagataaatgattaatggagatttattttttgctgttgagattttgttatagatgtttaaacctgtaattaaatttattttataaaaatagaccacgcatacctatctataaatggacaatgtttataaatgagtttgcatggtcttgaattgtattcccttaattagaattaacatttaagttttaatcattatatatacaaaaaaagcgagtattattaattttggtattcgtaatactcactttttgtatgttatgtaatgatttttttaatactcttgtcctttaatgattgtgagaataataataatttttattacaccatacaaccgaatctaatccaacgatcccaaaaagaagaacaacggtggctcgacttcatattcatttttgtccaagtgttctttttcaattatttgattgacggttttccaattttttacttcttgctcttttaaaaaatggctatgaaaaattctatccccatagatttcttcatagccaatgctaatttgtttcatgtcatttctttaaaattcctaaaaatatataaactaaaagcataagtaacacagcaaaaattgtcgaatatataattattgaaaaagcattgctttgcattggaactaaataatttaaagtacaaaataataataatgctaaaattccaactttaagcgaatattttaatctatccataaaatcacccttactgatatccccatttttctcctgtcaaaacgtattcctcgactgcattctttttagtttttaattatatatacccttactagtatcaatattcgatgcagctatagatccaaggaaaccaccaacacctgcgccaactaaacctcctgttagtgcaaaaataacactaatagcccccgcacctaaagcagctaatgtttttgtatatgcagaagaaagatataatgttgcagtatctttacctgtttctacatattgagttttccccgctctcaattggtcttcagcatgagctacatctgaattataagataatgaaattggactaacaaataatacaccagcagctaataataatgatttttaattagtttttcattagtttcttttggattatttttgtatttagctttcgtataaacagaaactagattatattttttcatgatacgtgctatctttcgtcttgatacagtaagacccttgtcatttaaattatttttaattcgtcttgtaccaaaaacttttctattagaattaaaaatatttatgacgacatgttctacatttgaatcatctttagtgattttattatcttttctttttataaaatcataatagctacttcttggtatttttaggactttacacttcgctgatactgaatattgatatacattcttttgaatgacttctattttcgtctcatgatcagcgctgcttgctttaaaatatcgttctccatttttaaatgttgaacttctttacgtaatttaatcagctctttttcttcatctgataagttatcttggtgattgaatgaacctgtgttttgatgttgctttatccattttcctaacgtcaaaggtgttaaatcatactcgcgtataatttcacttcttggcttaccattttcatataatctaaccatttataacttaaactctgaactaaatgttcttctttcttaaattaacaaaatctactctcatagaatttgtccaattagatgatataatagtagagtcgcctatctctcaggcgtcaatttagacgcagagaggaggtgtataaggtgatgcttattttcgttcacatcatagcaccagtcatcagtggctgtgccattgcgtttttttcttattggctaagtagacgcaatacaaaataggtgacatatagccgcaccaataaaaatcccctcactaccgcaaatagtgaggggattggtgtataagtaaatacttattttcgttatctcaattatactgctaatttttctttttgtaaaatatgcaaggtcttaaagagaaacatcaagaactaagagtgctctatgtcaaattggactgatgcgttaaaaatcggaagttaggcaactaaacattgcggcatatagcaacttgggaaatggaaaaaatagaatacttacatttagaggttgaagataaagaagatatactttattttgaaaaagaggatgataaagtaatagcagttacaaatattttatggacttgctctggtttcaacgatatttgatcaactgaataatgaatcgcctagctttattaaaaaactcctttaatgggttgtttaattttaaatgtaggcgattgtattaatgcttgaagaaagagaatctatcctcttaaaattgaattcgtcaaattaaaatacaagatatttgagaaactatagagtaccagtctaagtaaaataattcccaaaaaagctgattcattttaatagactagtcatctgtaaagaaagttgtccctaattactgttcaaagttatccagtgctaaagttcttgctattttttataccgcctgttagaaatttcctaaatctatttaataagactacatctgatatatggtcaaaagagtttatcttattaaaagagattgttctgtttatctgtatagcaatagttttaatcaattatatatacaaaaaaagcgagtattattaattttcgtattcgtaatactcactttttgtatgttatataatgatcttttttttgtttattatgcccatatgcaattactataatacctattaaaattacactaaccattattaaaatatatttctttttcatcactctaatctccctgaaaagaagaacagtggtggttctgcttcatattcctttttatccaagtgttctttttttataatatctttaggttttaattcatttttatggtctttttctttaaataatttaccaaatgtcttatcatcgtatcctatgctatcttcaaattgatgattgtcagttgcagagatgagaactttaaaatcataatttttgttgtcattaacatatccatctacaatatagccacccataggcgtctttttaaaactagtaactttcatagagctataattattaaggttatacttaaaatataaatttattcgtttttcttgcgtctcaatgtaatggtctttagttttcttattttgcgcatatgcaataactatcatacctattaaaattacactacctattattaaaatatttttctttttcatcactctaatctcccagaaaagaagaacaacggtggatcggcttcatattcacttttgtctaagtgttctttttcaattatttcatcgacagttaatcggtctttagcatctttttctctaaataattcacctattttatcctctttatatcctagatctcctttaaattgtttattagtatcagaaaatatcacagcatcaaatttataattctttttattattgacaaagccctttataaaataaccacccattggattctttttaaaacttgtaactttcatagagctataattattaaggttatgcttaaaatacaaatcaattctcttttcttgcgtctcaatgtaatggtcttttttatgtttatgagtcacacatgacacgactaccaaacctattataattactacaactattattaagatatatttctttttcatcactctaatctccctgaaaagaagaataacggtggatcggcttcatattcacttttgtctaagtgttctttttcaattatttcatcgacggagagtttatatttagggtctttttctttgaataatttgcctaatttatcatcatggtaaccaatatctttctgatattgattattgcttcccgaatctatacttgcttggaatttatattttttatcatcatttatataacctacaatgaaatacccacccatcggagttttatggaaatctgtcaccttcatgtttttataattgttaagattatgcttaaaatacaaatctatacgcttttcttgtgtctcaatgtaatgagcctttatttgtttattatgcgcataagcaataacaattagacctattaatattgcaacaactaccacaaatacatatctctttttcattttaaccccctagtgtagtatttatttcttatagattttaaatttcaaaaaaacaatttactttgacatgctatcttttttcaatgttccgtatacgccctcaagaaaagttgtttcaaaatacttttaataattactcgctttacatcgtaataaatacataaagtcgcgcagttttgcatttcgtattatgtataaaatagcaatcttattctaaattaatatctttttaagttcacttatcattttattacttaaatcaaaatttgtctcatttctaacattttacattacatcaattttaattattttaaatattgtataacttaattatttaaaatgttataatcgataagattgttaatatttaattttccaattttaatttctttacttttttagatattaaataaatctgatggtgactgatggtttccatgcatcaacgaatttcccaatcctttggaaagttgaatcattaattaatcataatatcaattgcatacacgcaaaaaaaggagacatgtcaatgacatataaaatgaagaaatggcaaaaattatccaccattacgttattaatggccggagtgattactttaaataatggtgaatttagaaatgttgataaacataaaattgctgtggctaatacgaatgttcaaacgccagattatgaaaaattgaagaagacgtggctcgacgttaactacggttatgataagtatgatgagaataatcaagatatgaagaagaagtttgatgctaaagaaaaagaagccatgaagttacttgatgacatgaaaactgatacgaatagaacatatttgtggtcaggagctgaaaaccttgaaactaattcttctcacatgacaaaaacctatcgtaatatcgagaaaatcgcagaagcaatgcgtcataaaaatacttcattaaaaacagatgaaaacaagttgaaaataaaagaagccctagattggatgcacaaaaatgtttatggcaagaatccttctcaaaaagtcgatgatttaactaaaaatcgtaaggggcaaactacacccaagaataactcattgaattggtgggattatgaaattggtacgccaagagcattaacaaatacactacttctaatggatgatatgctcactaaagatgaaatgaaaaattattcaaaacctattagtacatattcaccatccagtgacaaaattttatcttctgttggtgaatcagaagatgctaaaggtggaaatttagtggacatttctaaagtaaaacttttagaaagtgttattgaagaagatgtagatatgatgaaaaagtctatagattcttttaataaagtgttcacttatgttcaagaatctgccactggtaaagctcgcaatggattctataaagatggctcttacattgatcatcaagatgtcccctataccggtgcttatggcgttgttctcttagagggaatttctcaaatgatgccgatgataaaagaatctccttttaaaactacacaagataatgctacattaagcaattggattgacgaaggttttatgccattaatctataaaggtgaaatgatggatttatcacgtggtagagctatcagtcgtgaaaatgaaacgagtcatacagcgtcagcgactgtaatgaaatcattgttgagattgagtgataccatggatgattcaacaaaaacaaagtataagcaaatcatcaaaacttctgttaaatctgattcaagttacaaccaaaatgattatttaaattcatattcagacatagataaaatgaaaaagttaattgatgataaatctattactactaacgatttaacacaacaacttaaaatatataatgacatggatcgtgtcacctatcacaataaagacctggactttgcatttggtttaagtatgacgtcgaaaaacgtcgcacgttacgaaagtatcaataatgaaaatctaaaaggttggcatactggtgctggaatgtcttatttatacaatagcgatgtcaaacactaccgtgataacttctgggcaacagctgatatgaaacgattagcaggtactacaactttagataatgaagaacctaaagaaaataagaactccgataaaacttttgtaggcggaacaaaatttgatgaccaacatgctagtattggaatggattttgaaaatcaggacaaaactttaactgccaaaaaatcatatttcatattaaacgataaaattttcttcttaggaactggcattaaaagtactgattcatcaaagaatccagtgacaacgattgaaaatcgcaaagcgaatgggtatacgttatatacagacgataaacaaacaaccgcttccgataatcagggaaccaattccgtctttttagagtcacccaataaacctaaaaacaatataggctatcattttttaaacaaaccgaaaataactgtaaaaaaagaaagtcatactggtaagtggagtgatataaataaaagtcaaaaggatacacaaaaaactgatgagtattatgaagtaactcaaaagcattctgataaagacgataaatatggatatgtgttgtatcctggaatatctaaaaatgtctttaataccaaaaaagatttagtaactatcgttaaacaagatgatgacttccacgttgtgaaagataatgaatcggtttgggctggtgtcaattatagtaatagcactcaaacttttgacattaacaacactaaagtcgaagttaaagccaaaggaatgtttattcttaaaaagaaagatgataacacttatgaatgtagcttctataatcccgaatctacaaataccgcttcagatattgtatctaaaatttcaatgactggatactctattacaaacaaaaatacatcgactacaaatgaatccggcgtacgctttgaattaactaaataagcaagaaaatctcgacattataccatttttatagtgtcgagattttataaatatctctatcattcaccttgtaacccacagaccacatcccctttgataagttctcgattatttataaatcgaatttttaaagatgtacatgcttcaatattcttatcattcattacttgaaaatgtatatgaggttcagtagaattgccagaattcccaaccttcccaatgatgtcaccatatttaacattttgcccctcattcacaatgattgaatattgttgtaaatgagctattaagctatactcattttctgcgtgcttgattacaatataatttcctaaaaactgtaattcattcgtacttccaatactgttgtcttgaaccccattcactactttttcaactgtaccatttgctggcgcaatgatatcttttccaaaacaaaaataatcagtatttacttttccttgattcttatatgttttatgattttctttaataactaaatcaatagcatacctttgatgtgggtataaatagtgataattatataattcattatctccgccccagaaaacctcaaagcaatctgttgtcggcactgcgtattttaaagtcgtttcattcttaatcgcatcataattgattaacggacgcataacaaatccgataatactattatctttccaagtcactgccactccaaattgatttgctttatctatccatatttgctcaatagtaccatcattttgagtacacacttttaattcatgtacatcagactgccttgtataagatttgaaaagtttccaaaactgccaataactaaactctcgcttcaaattttgatcaaaaatcttatatattttcctgctcttacttttatttaaataatccccaaagtttgttttattcatatatacttaacctcttatgtttattttggtatcaattctatactaataatatgttcataattttgattaggacattttacatataaaataggagtttctctcacttataattcattatccaattatattttaatatatacgtgatgcaattcaatattattctcatgatttttactgtaatgatttattatttataagatttttttaaaaaaaccctcactgacaaatagtgggggattttatgcattactattaaataaacatcgattgaagtaagccttttttctgttgttgaagtatttctattttttgtttttctaattcaatttgttggtcaaatctatctaagaattctgctattttttgctgttctaacttattgggcaaaactaaaggtaattttgcatattcttcactattaatgcccggttgaccagatcttacagacatgaccttcacccatttgttaaattttgatgttagtgtaaattggtaaatgaacaaaggattattttgttcgtctatttcaaattttattaaaaatccagcgaaatagtaattataaatatccttttcttctttgtgaatataacttttgcccgtgctagcaccagttcgtgcaaaaagaatatcatttcttttcagcttgtacttattattaagttcatcaggtgtagttaagttttgataatttaatttccttgatttttcatcaatatcagtaattcttatatatatatttttcgaatcaaaccttgttgcagatgcacctataccatacatagattgttctgtaatatcccctaacttcttctctttccaatctggataatcttcaccattctcatctttaaatcgcaattcttgcgagaagattttctgcatatagccttttttctgttgttgaagtaattcaagtttttgttcttctaattcaatttgtcggtcgagtttgctgaagaactgaccaattttttgttgttcttgctttttagggtaattaattttaatttttccaatttcatttttgtttatttttttgggaaatgccacatgtaaagtttttctccatagttcattctggatagatgatgataaaattaaatttttcaaaaaataggaattaagattcttagtttttaataatgctaagctaacatagtaagcaaatttttcatttgaactcactatgtttggtgtacctatatcaccaattcgagtcattaatatatctccgaattctggtcggattttaaactctttttcaaacgcttcttctgaaatatacttgcttgaattcaacgtttttatattttctactgacaaaaattttataccttcgtttgtatatttaggagtttgatgagtaccatcatatattttggctacttcccctagcttcttctcttcccattcgccttcaaaccctgggaacctcaactctggcacatttttcttttgtgtattactcatctttcaacaccccaagttctttcaggtatgcattgatttcttgctcaatttctgcgatttctttatcgatatttttcaaatcttgttggacttgatctaaatcaatcggtgcttcttcttcgaatgtatcaacatatctcggtatatttaagttgtaatcgttatcagcaatctcttgtaatgtcgcactgtagctatatttatcaatcgtttctttacgcttatatgtgtctataattcgttcgacttgagcgtcgcttaaatggttttgattttttcctttttcaaaatcattggatgcatcgataagtagtacgttgtcgtcttgttggcgacattttttaaatactaaaatacatgttggaatacttgtcccatagaaaatattggctggtaagccaatcacggcttctaagtagttcttttcttcaattaaataacgacgaatcacgccttctgcagcaccacggaataatacaccatgtggaagtacgactgccatggtaccttcatcgtctaggtaatgtaccatgtgttgaataaaggcaaagtctgctttagattttggcgcaagcttgccataaccactgaatcgttcgtcattttcaaattttgaatctgctgtccattttgcactgtatggcggattcgctataaccgcatcaaatgtattgcctaaaaaggctggattttccaatgtgtcatcattacggatatcgaaattttcataacgtacatcatgtaataacatgttcatgcgcgccaagttatatgtggtattgttacgttcttgtccgaaataacgatacacttgtgtctctttaccaacacgtaacaacaatgaacctgaaccacatgttgggtcgtacacatgacgtaatttatctttaccgtctgtgacaatcttcgccagtatcttagatacttgttgtggtgtatagaactcgcctgcttttttacccgctgtcgccgcaaagcgcccgataaggaattcgtatgcatcacctaacatatcaatttccatgtcactgtgaacgaatggtaagtcgtcaagattaaccatgactttagagattaacgcagtacgttctttgacattgttacctaaacgcgttgaacttaagtccatatcgctgaacagtccgataaagtcattttcactttcttcacctaatgttgatgtttcaactttacgaattgccgtcgctagatgttcgatatcgaaatcttgcgtttcaatttcacgaatcatcgcactgaataaatcttgtggctcaatgaagtaaccgacttgatcaattaattctgcttttaaatcttcacggtattcttcatctgcccatgcttcttgatacgtgatatcttcacctgacaaggcatctgcatattcttgttccgctttttcagataagaagcgatagaaaatcaagcctaaaatgtaattacggaattcactcgcatccatgttccctcttaaatcattcgcaatcgaccataattttttatgtaattcagcttgttgctgacgttgtttttcagtaatagacatgtgattcctccgcctttgaataagaaatttatctctttgtgtaatagatttattataacatttggttatgttgcgatgttgagaattttgatgttgatggtggaattttttgagttttagtggcgcaattgttattgaaaaattttaaggaaatgttgtagctttcaaatgctttcaaaatcatttatattctcaatgatgtcaaaaagctgttcattcttacataaataaaaccaatcaacaattgagttggtgaaaatcaatcattgattggctttgatgcatattgaataatgcaatatatattaataaatgttagttatagtatattttgtcaggattaagtgaatgtctaagttttaattatttatctaaattatctgcaatgaatttcttaatttcaggagagaaataaacagcaaatcctcttttactttcacctgatggagtattaccagcaaaaattacgccaattgcttctcgtttactatttaatataggtgaaccagaactgccaggctggataattgcatccgatgtcaatatatttccattcactgatagtactttaccagttgattcatacatttgtagtttatttccattaggatttggataaccaataacagatataggttcactttctttagcttctgatgctattttaaatttgctagtgaaatctttgaattttctaccttttggttgcgttgatttttcttcaacttgcacaaccgcaatatcttctttaccaggataatctacaatcttagtaactttataaagtccaccaccgttattataaaaaccattaggatgtgctttaatttcatcaccgactttcatgtgataagtaacatgtttattggtaatgattgtatgatttccaactacaaagcctgttcctgcgcccatccatgtaacaccactgtatggtgcaacattcgtattggtaattaatttcacattatgttcggctttagccgtttgttgaataccctcaactattgttgtgccgacgccagtcactgatgttaaaatcgtcaatgccgcaatacttttgatgattatatttttattcatttttctgctcctctaagtattcgtatatatagggttaggtttttgaagttttattttttaaaatcatttagaataaatagatacagagagatgatttgaattgttgattttgttgttaatttttaagtttataaatttaatctaagtttggaaaatgttagtgacctatttgtcttatttatctatgttatctgcaatgaatttcttgatttctggtgtgaaatatacgctgtatgactcttttttagaatgaccaatttggtctccactatataaaacgcccacaacttcatttttattgttaaagaccggtgaccctgaattgccaccttcagcaaatgcatctgatactaatttatctccattaattgatagtactgttcctgttgattgatacatatgatgtttatttttatatggagctggatatccaacaatagcaattctttcattcgctttaacttccgatgtcagtgttaggatttcagtattttcaccgaactttttattttttggataaacagaatcttcttcaacttgaacaatagctaaatctgccgagcctgcatatgggataacttttttgactttatagtatccgccagtatcattttcgccattcggatgggcaagaaccgtactgcctacttgaacatctttcgcgacatgtctattggttaaaatggtatttttacctactacaaaacctgtacctgcgcctactcttaatatgcctttgtatggcgaaatactagtattcgttatcttcgtcacgttatgttcggctttggctgtttgttgaataccctcaaccactgttgtgccgacaccagtcattgatgttaaaatcgtcaatgccgcaatacttttgatgattatatttttattcattttttgctcctctgtttttcatgatgttttgttatagacatttgtttttttatgttatattcaccgatgttttttcattaaaatcattgaacaacatgttcttggtgtaaatttaaatatgtttattgttcaatgtgcttttgaataaaatctttgatttgaggcgtaaagtatacggcaccattatattcagaaccaatttttccaataccgccatacaccacacctatgacctcattgttagaatttagaactggtgatcctgaattcccgggttcaatgtatgcatcaaaattcaaattattatctttaatactttttacagttcctgttgattcaaattgtttgaatgtattttgagctggtaaagggtatccaataactttaattttgtcgttaacttttgcatctttggcaaatttaaaagcttggacattttcgttaaaattataaccatttgctccacgttcaacagcattttcttcaacgttcattactgatatatcctcattacctggataatcagaaatatttttaattttataaataccaccatttcctttgtcaccgtttggatgggcagtaattctatcgccaactttataatcttttgatacatgtttattggtgataattgtattttttccaattacaaaacctgtcgcatctttaaatgaaacgacgccattatatggaaaaacatttgtatctttaacttgcgtaacattcttctctgcatttgctatttgttgtgtctcttcaacgactgcagcatttattccagttactgaagttagaatggctaatgctgccatgcttttaatgactatatttttattaattttcaagctcctttacaattcgagatatgttgcaacgctcgtttaaagtcaatttgtttatttatctatgttttctgcaatgaattttttaatttctggtgtaaagtagacgccatatgcatttctgttgtcatcattttttacatcagaagcaaaatgaataccaactaattcgttgttgctgtttaatacaggtgatccagagtttccgctttcagtatgcgctgaatatacaatgctgctaccttctactgacatcacaggaccagttgactcatgtaaaacatatttatttttgtatgggtgtggataaccgatcactttaattcggtcaccagctttagcccctgctgcatatttgaacggcgttacattatcattaaaattaaatccttttggaccaagttctattgcacgctcttcaacttgaatgactgatacatcttctttacctggataattaataatctttttaatcgaataaataccaccattacttttatcactatttggatgtgcagtaatacgatcgcccactttgtaatttttcgacacatgtttatttgttaaaatagtattctttccaactacaaatccagtagcactattaaaagcaactacatctgtatatggaaaaatattagtatctttaatttttgtgacattattttctgctttggcagtttgttgaacttcttcaaccaatgttgttccaatacctgttacagatgttaaaattgttaatgctgctaaactcttgatgactacgtttttgttcattttaagttcctcttttttaattattttgatatctagatacataattcagtatatttagttaattatgtaaccgttttcttaatcactcttaaaaaactcaacttcacgaatgaattgatgatacttatttttcaatattattttgaataaattcttttaattgtggtgtgaaatagacaccgaaattcttttcagattcatcttttccactacctgcatataaaatacctatcaattcatttttagaattcaatacaggtgatccagagttccctggttgtgcatacgcatcaaattccataaacgttccattgatatggttaatcgttccagtggattcaaacattttatattttgtttgtgaaccctttggataaccaataacagaaattctatctttcgcttttgctccgtctgcaaattttgtataactaacgttcttattaaaattcaaaccttctgtacttgtttcatgaacatgaactatcgcaaggtcttcttttccgggatattctacaatgtctttaacgtcgtagtttcctccgcctttacctttactcgaatgatgtgctgatactctatttttaaaaatatcattacttttagcgatatgtttgttagttacgattgtatttttaccaacaactacaccagtacctcccgcaaatgctaccactgaattgtatggtgccttagttgcatcggtaatttctttgacattcttttctgctttggcaattgaatgaggctgatcagaaatattttcagcgaaaccaagagatattaaaatagttaaagcagttaaacctttaaccattacatttttattcatattttacctcctttaaaatttatttttatagttaatgtatctagatacacatttactatatacattttatataaaaatattaattaaatattaattaactacttattaacattttattaaaattatcatccatgaattgactcatttatttaaatatgcttaaaactcaatatcacgcaattaaaattgactttttaggattattttggtcttaaatattaattattgaattaaaattgtaatatttattcggaaattaagtgattgaaaatatatggcagaatggtgaacaattcacatatttataatctttcactttattatgttttgtgtttaacaatattattagcgattagttcccctattatttatgacaatatgcagtcaatcaatgaaacatgtatgtatgagtatatttggaactagtaatgtattgttaattattgaagttgattgaattatggaatttttttcgagatatgttttttcggggatcagattttgcgattttgacttggatagagaagttgcgatttgtaaatacgtttttcaggtttgattcaatttcattgttaagataatatgtattagtttcattgacatgttgatgcatgtctttttttgttctgataaagtataaaatgtttacttaatatgacacctgctaattcaaacattatttgagacattcttttcaaattaattataaatttttacctatagactagtttgatatttatctacatctcaaaattctcaccaacaatctttctttcccaacatttttactttaatttttataattcaaaacaacaaaacgatgttaaaaaattattctattttttagttaatagatagttaatacatttttgatttttagttaattgttcttttaaaaaattattattatatttgcattgtaaacgtttacaatataaaaaaaggagaaattaaaatgaatacaaaatttttaggtaaaacattagtagcaagtgctttagtattaacaacattaggaacaggcttacattcttcatacttaggattagatacaaataaagttgttaaaacagctaaagcagaagaaaatatgacagaaggtcaattgtggaaaaaagttagagattctttaattgattcacagattattagtggtaacaatggcgagtcagttaaagtaacttatagcaatggtacaggtcaatctaatagtgttgaatcaactggtaatcaaactggtgatgtgttttcaacaccaagtaacttctcaaagttaaataatataactataactagacaaaatgtaggagaagaagatttcaataaagttttaaatggaaacaccacttggaatactcttactgaaaaacttgaatctaaaggtttaattacaaaaggtcaaaaagttacaatccacagtaatagcacaaccgtttcaggagtggttggagaaaaattgaccaattcaaatgatatcaaccttgaaaaacgcttcatcaacaaaatcacaattgaataaacctaaaactcaaatttccttaattcataaaaccttaataactaaccctttcttacaaatcacctagcccataataaattaaaacgtcatttttatttcaaatagcggaaaataaaaaaaccattccgcattaactttggcaagttggaatggttaaaaaaatattttagaagccagcgtttggcttgcttagacgacatgttcgcgcatgtcgtcttatttttacatttatataataacacgcaattcaataaaatgtctaatcaataaacctcaattacattcaaatccaaaaactttgcacctaatattcatcgcttaaataaacaatacttttaattaaccagacattgtcaatcgcgtctaatacccctgctttccgaatacaaaattattttgtattcatatttatctgttctcttttcccccttttcaacgcaactaaatttcttttaccattagcgccccaatctttaatctttaatctttaattgttctaccgctccatttattaaatcctttaaagagtaaaactgctaatagcaacgtgataataatatagatcgccaatgttaatgtaactggtatactcccttcgataaacatataaacgtaacgtgtagcatatgtgattggtaaatagaaccacgaattatctccaagcgcttctaatccgaaataaactttaaaaataaacattaaaactccgacaacaatagccattacatctttaatgaaaaatatatctaacattatcacaaattattaataatgttaaaaatgatggtacttaataaattaataaatattccattgtcatgtattgctaaactattatgacgctaaaaagtaataattattaagtttatagaaaacatctgtataacttactgcaaatactgaaaataatataaggatttaagattgtaaaatctaaactaaggagatgtttaaatgcatttgaaactgaacgatgaagatttaaattatttactaaatctaagtaaagaaatacttgaacaatacaacattaaattagtcgatacttgtaagggagatattagcataacatcatgtaattctgaatactttttcactttaagctactttttaaagcctggaaaagcaactataaatttcagagaatgccgttacaactatagcttgttacgtttaaatcttaatgagggttttcataaaaactctaataatgagaaaataaggggaaatagaattaatatattttctgaaaatgaatttatacaaaaagctgacggcgtaacccatatgaaagcatatcctttaccttataaaatatttgaagatagctctgattttgtaaaacaattatttactttgcttgaatatacaaaaactaatcataatgataatattaaaattgaaactaatctattcatgagttggtgatactatgcatgacaacacaattaaatctattagcaaagactattttgattacttacaaacagaatcaaagtttatcccattagaaaatgagactatagaattttattcacctatcatcgattattttggtgattctatttctgtaaatatatctttttcaggggatcgatataaactaactgatcatggtgaaactttatggaacatggaacaatttggtttagatttaactaatcataaaaaacaaaaaaagtatcaacttctcaataatattatacaaaattacggtctagtcattgaaaataagcacataaacttttatacaaatagattagacttatctcaagccattcatgattatgttttggctatttccgagattagttatttgggaatattaaagaaagaaaatattaagtcattatttaaagacgaagtgatgcaatattttctatcaaacagaaagatatatcctaatatgtttcccgaatttaaagtagagggaaaatctaagttaatccatagtttcgaagcagtatttccaggagaagctacagagtatgttaaaacaattaaacgaatcgataaaaataatgcaaaaaatgtccttttcgattggaatgatgttgaagtacatagaaataaaaattttgattctaatgctagacttaatatcattacagaacaacaaggcgatattagcgaagcagtatcaacaatgttgtctcaatataatgtagatgtattttcatttgaaaacaaaaaacaacttgaagaaaagtttagtaacgtataattatcgtgttatatagtgtttcttcgataatagtttctatttcaattaaatcaccgatacttaaaatgataaatttaccaataccaagtttgtgatgaactttcaccgtcatacaattatagatgctatatatacaaaaagaaccacgccgattaagacgtggttccatttttttaattttttatatgttggaagtttctaaataattctactttcgcaaatttagcaccctgctatttagcaaagcaatctacaattccctaactaaaaattatcatatgtgtaaataaaaattatgttagttctttaattccgtttgataattgaaataattgcacattgttgattatttaatcatgtacaattctataccccaggattagtttctttagaatccgtaccgattaatttaacagtatggttttgccagtcaacttcataagtagatgtaaacgttactgtattttgatttttgtagttattaccaatccagtgtagtcgattccattgattagtatatctatccatttctctttggtaagttactttgattttagatttttttgtatcattttgtttatgagaaagtacgcttataaattctgggttaaagttaccacgcgccaataaaggcatttgatgtgttggcaagaaattttgaccagcatttgaactactttgtctaccacctaaaaacagttcattaccatatgttgggtcataactatctctaccatatggtccccaaccattattcataattttgtgcgcctcaacaccccagccaattgatttatgatttgtttttctatcaatcgtagttctgtaactttcttgtttataatttatcgtttctgaaaatgattttgatccatttaatccacctgataagccattagatatattaatatctccgccataagaataacctaatgtttgttgaacttggaattcttcattttgatttttaggtgcgtagtcaacaacatttacagcatcatttgattctgaactaaccgaaacattatacttaccgccccaataaaactgtgagtaattgtaatcttttggattaggctttttataacctgaattaatgtttccggctgccttaagtactaacgtatctttgtcataacttttatccttaatgaaattaaacgttaaaatttgagaaatattcaatttatcattatcagatgttgctgtcgttttgtataaagtgattttatcgtctacttttttctcgctaacaggtgtaatatgttgagctgcatcaactgtattcgatagcataagcaatccaattgatgtagcaactgatgatttgactaatttcttcattttcatattaattatgtcctttcactttaatttcgtgtgttttccagttaacttcatatctaactacaaagtttctatttacaaatgcattatgctttctttctgcgtaaataccagttctagggaataaagtcgcatatgtaatatctaagtttctaccatatgaaatttcaaattcactcgtatcacttgaacctttttcatgtgatagtgtagtgataaatgatggattaaagccactttgaactaatggtggcaattgattatcaggagcaaaatattctcttgctgaacctgacggaccatttggactttgtacgaataaatatctatcatgcgcagattttttaccatcaggcgtaacaaattcgtttgctttaacgccccatttaacagattttgagttttgcttgtctacttcactgacataactcttttgggtataactaattgttttagaataattaaatgagccattgccacctatagatggtgctgactggaaattacctccaatgttatatcctaatgtttgaccaacatccgtagtttctattttgtttttaggaaggtaattgattaagctaacattaggatctttagtcgtcagtcctatattatattggaatggccaaatcattcgtttagttaattcatatccactacccttcacatctgaaaatgaagttctggaattaataaaaccttgcattttaacaattaaagcgtctttgttatattttttatcttttacaaagtcaaattgaacattttgagtaacgccccatttcttactacttacatcctccgtacgtttgattacttcagcaccatcaccaatattttcaatattagtatttgctctagattcttgaatcggagatgctaaaggcgcaatcagtcctactgacaaagttgcagctaacatttttttcttaaacataagtttcactttctttctatataaatttttaatacaaatttattctagattatttcacttatttataaaattaactgttcattaaaaaataaaatactataaaatattaaaaatgacacaatttattcatttatgttgctgaaaaccggtcattttggcgcaaccttcattacatttaaatagttccctttatattcgaacaatatgataaaattgccgatactcaactttttcgctataaaaatcaaaacgaactttaatcaaatcttaaaaaataatgtttgtattatcacaaataatctatatttgaatttaaaattaactgattattaactattgccagttaaacggagatgaaacaacttatgttaataaatcatatgaaaacaagtctgttataacttaatcaatacgtatatttacacaatgtcatttgcttaatctaaaaaatttaatgctatgatttagtctaattaaaaacatatatatttactatgaactaaaagttcaccctaaaaataaaaaaccatgatttcgaagtcttcataaactgaagcttctactctcatggcaatttatactatgatattcaattataatgcctagtctcatagtaaacggctactacattcgcatgtactttgttttactgtccacgcatggtcgttgacttatttatattataatataaatattttatttttcaatacttaattttaaaaaaatcccctatgaaaatgttgatgagctgcatctttaaatcttattatacattgtataaaattatattgcgagatgctaaattgataatatacacttttggttgtgtatgcatctcacctatctttttttcttttttcaaataagaaagtattaaaaattaatgcctatacaacgttaaaggaggaacagacatggctaaacttgatttaaatagtcttgacgacgagcacgtaaaattattaataaatgaattaaaatatccagaaactcatatcgatgtaaatgaataaaaacaatagttgctagtcgaataaatgaaaggcaagaaataataagttttaagttaggaataaagtacttattaacaataaaaagagggaacatagaaaaagataggttttcaatttcaatcattttcaaagatacctatcacaccctagttagaatagatattaacggtggtactcacgataatccagatggaacaatcgctccgaaaagtcatattcacatatataatgataagtgtgataaaaaggataggtttgcttatgaaattaacttgaaagatttccccgacatctataacttgtataatgtgtatatgtcgtttttagagtaaaataatataaaagaccttgaataaaggagggataatatgactacgtttgatgctaaaaaaataaaaaaagaatatcttgattggtataatcagaccttagagttttctaatttatcaaacaatgttgtaagaatagatacccctttaaaagataattctttagataatttaaaaatatatgctttatacgatcagtccagagacatgattacactgactgatgacggctatactatatttggtttagaaaataacggtgtttctataaataaatttaaaaaccgtaacaagatttttgaagagcatctttcagcctacggtattaaatacaacgataaaactcacgaaatttatgttcaaactaactttaaaaattttaataaatctaaacataatttattacagtgccttatatttgttagtgatatgtacttactttctaatcctaagtcacagaacatattttcagaagatgttgcaaacaaatttgatgaacataacatttattacggaagagatttacctattataggaagcagtggtgttgttcataattttgacttttttattagcgctaagaaaaaccaaaaagaaaaatttatcaatgctatttctaatcctaataattctatgattattaagtcgaaaataacagatgctatgcaagcaaaaaaaataaaaagacacaggcaaaatgagtttatttttattttaaatgactcaaaaaaagaaataaatgaacataataaaaaccttcttcatgaaaactatattagtactatagattatagcgaattagacgaaaagataggtttattgatttaatatttctggacgtgataatatcaatttttttattaaatgagagaaatttgacaatttcaaaacagattaagctagcaacttgaatagtcttatagataatgcagaatcgtctacacttagttgaacaaattctatgagaatagatattgttaaactagttgggtaggcgattttattttgacaagagaaagaagatcatttagtaaggattttaagttaaaaatgattagattatatgaaaatggtatgactaggaatgaaattatacgcgcatatgatataacactcttaaccttctcgaatttgatatatactgggtcattcaatcatcaagacaacttaataaatgatgataaatgttcataccattttgcaaatataaccagatactctcaataaaatgtagagttcaaaattaaaaatgtcaacattatagtaaactaacagttgtgccctgttcatattcttaaatctttaagccttatcgaacaaataaaagcagatagtttttttattttcactttttttagaacaaaaagagcaaggtcaacgaatcagaaaatctttttcttgatacgtatttgacacttgctcttttaagtatactaacatttcattgtatttccgttaaattaacggagaatgcggattacctcgatagatttacctctagagtgttaaaaaaatgtacattcttaaacaatcaaaaatatacgttattaaattatcatttccactagagaatcatggcgactaaaagattattaaagttaaaatacatttaaaagcacgacaatattaaaccgctaaaatacgtcattttcaaaccgccataaaacagcatttttaaaccgctgttgacatgctctcatataatattttattttcatgattcagttgataatcatcaatcacttaatctttatataaaaatacatcgatatgataattagatgagctaactgttctattatcactataaaattgaaaaaactctgctcctactgaaccttttatgttatataaatcataataaaatgattgatcttgatgattatgagaatgaaagaaaatgcatcctttttgtatgttaccggtatctttattgtatattttatataaattttctaatttaaatcgaactttagtatctaattcttgtactgttactttagcctttttagtttttataacaaaaccttcttgttggacaccatctttaaatacattaacgcctataactctctcttcatctaattgatttccatcatgtatcgtaactcctccgtataagcacgatgttttttcttcagttatgcctacacatttatgaccataatacaatccgaaaacatctatattttttctttaaatttatctgctaaatctgctgagttaaactcaacttttaaactagtagtattaagttcagatatatctatgttttttaatattatagtattattcagtaattgatctgcactaattttattcgacttgtctaattgccaagttatatcagtatagtagtttgttaaactaaataacttactactatctagatcagactttttctttaaatcttttttgtctacatcagcattaacataattaatatttataagacataataaagttattataattacagctatgtagaacgatttcataaactttttaatattttttataatatactctccctcaattattttttggttaaatgaacttctacattaatagatttactctcaactgtcttattatcattataaattagtaaatatttagtcggataaaatttttcaccaggttcaggcatcatatcataccaaaaagaatgaccatttccttcgataaactttatatagccagtctcataaggcgaactattaaattcatataaatttttatgcttaagtaaatagtttctaactttataatctatttcttgtgctgttatgtttttcttattagtaggtatatcaaaagataatgaatttctttcgttttcgtatactttaattaagatattatgagagttatcagttagattatttttatctatttgatttccatcatgctcggtcacaccgccatacatacacgttttttcaattagtctaccatcatttaattccatattatccgctgaaaaatagcattgataataatagtttgtcccaaacaaatctatatttttattttcgtatttatccgaaaggcttttattattaaattctgtttttaaaattttagagccatcaattttagatccatttattttaaataataaatcatgttgtaaaaacttttcttgggatttaatgtttgtttctgatacgtgtttatcatcatacaaatacctcatattatccattagaccagtgaattcactcgctttattcaattgttctggtctaggattgccacttaacataaataataagctgcaagacttaacacatatgaagataaaagcaaataacttcattccaacaactccatattttaaatttttataaatttgatgtattacaggtaatattaaacgtacacattacccttaaaggcattaaaatttaaatagttaatacatatgttaatttcaaataaattcgcattttagtgttaaagctaattatcattagttactatctacatatgatatttcaacatcaagatgaaatttttcagattctattattttattatcttcataaattttcaaaaaacttacaggcagtccatctcctgtataaaacaaatcatatgaaaatgatttttcatcatttaaatgaaataaaactttccccttattaaaacctgaataaaatttagatttatacccatattctttgcctttaccagtgttattatgaccatatatattgtattcttcttgaagatatctccttaatttaacatcaatttcttgagctgtgactagttttttattagttgctattttgtcagtagaaattgttttatgcttgccattaacccaaagatttatagggatttttctagcagaatttaagtattgtcctgataaagtgacccctccatacatatatttagatttacagggaccattataatcaatgccaaaaatatccagtttctttcctttaaatttacttatttcgtcccaattattagattctgagatcaaatcattggtaccggttgaaaattcgagttgatttgcaataggtaggtttttatctgtgacgccttttaaatctatataatcatatttagtatagaaatttcttaagttacctacaccaatatctccttgcgcatacgaaaggtctttaatgttaaaaaataatataaaaactaatataaaactgtatttaatttttttcatggcatttcctttactaagttatgattgaagtatttcaactttcgtccttataagatatttctacatctaaatggaatttatcagtttcgacagttttgttgtcattatatatttttaggaaactttcagcttgccctgttccggtatcaaataagtcataagagaatgatgtaccgtcattcaaatgaaatgatattttcccagtattaaatccagaaaaaaacttggattttgtaccgtaatttcttcctttatttgtatcattaaagccataaatattatattcttcttgtacatatcttcttaatttagtatcaatttcttgagctgttaccatctttttattagttgatactttgtcagtagaaattgttttatggttgccattaacccaaagattaataggaatacatctagacttctctaaataatcacccgctaaagtaactcctccgtacatatatttattttttagacaatatccactataacttaggccgtatacatcaacagcacgatttttgaatttttttacatcttcaacgttcttaaattcagcagttactgtcgaattatccttagaaaaaactaattgatgtgaaagactattattgtcaggattaatattttgatggctttcaattggatagctaccataatagttcctaagattcaaaactccgacatcagcggttgcgatatgattttgcgaataacaaaacaataaaacaacaatgataagtattcttttcattttatatttctcctataattaaatatgcctatctttattatccttttattgtaaaaaaccattcttcttcttaaatcatcatgactctatcccacttatatactattactcgttaatctacttttgttatctatactaaaatagaaagctttttatagtaataaagttagatttgaattattaatcgttcatcgtcatttactaagctactttgtaaaaaatatgttaatatctatagttctttataggattgcaagttgatatgcatcaacttttagattgttatgtaaataaataaacatcaatatgatagtctgatgaatctattgttttattatcattataaatttgcaaatattgatctggtaaatttcctttaatataaaataaatcataataaaatgattctttatgctccgaatgagaatgaaatttaatataacctttttgtacatcactagtcattcggtcatataatttatatgcattatttaattttgttcttactttaatatcaagttcttgtgcagtaactttctttttatctgtagtaacgataaatgtattaacatttaaattatccttatacacagctactcctatatttttaggctcacttaatttattattatcatgaggtgttaccccaccataagtacaagcagtattcacttgataatcaccactacaattcgctttatagtagacaccataaatatcaacagtctttcctaaatactctttagaaatcgctgatgagctaaattccacttttaaatctttaaattcagcagattttccatctaaccaattaatacttttaaataataaatcgaagtctaagaatttttctgtagttgatacaattgattttactgtcgtaaatcgattatttatataatcatcattaatattatgtagagcaatagggtctacacttgacttcttacacaaactctctattttaggatctttttcatttgcatatgaattgcttacactacatattgcaattaaatatataattaataataatacatttaacattgctttactcttttttataatatccctccttcacaaaaagcttttcttatagaaacttttcaatataaattaaaaaattctggttttaacctttaaatattcactaatattttttgattacgattttaaaacttaacaatcctatttacaattgaacaaacacattttaaactaagtgactcagataatagacaaaaaaccttaaaaatagcgcttaaaatgggtaaaaccattttaagcgcctttacggagagtgagggattcgaaccctcgagacgcttgtggcgcctacacactttccaggcgtgctccttcggccaactcggacaactctcctcaacaataaatatgtaataaaaaaacagaagcgatatttcacttctgtttgtatgactcctacgggactcgaacccgtgttaccgccgtgaaagggcggtgtcttaaccgcttgaccaaggagccatggctccacaggtaggactcgaacctacgaccgatcggttaacagccgatagctctaccactgagctactgtggaataatagaaaataatggagcgggtgatgggaatcgaacccacaacatcagcttggaaggctgaggttttgccattaaactacacccgctaatgtaaacgattatggggcggctgaaggggatcgaaccctcgaatgtcggaaccacaatccgatgtgttaaccacttcaccacaaccgccatgaattaagaatggttcaggacagagtcgaactgccgacacatggagcttcaatccattgctctaccaactgagctactgaaccgtaatggtaataataatggcggtctcgacgggaatcgaacccgcgatctcctgcgtgacaggcaggcgtgttaaccgctacactacgagacctattaaattaaaaactatgtattgcgggaggcggatttgaaccaccgaccttcgggttatgagcccgacgagctaccgaactgctccatcccgcgctaatattattttgaattacctaattaatataccataatcaaaaacctaaagtcaagaactttttgaatttaatttaaatgttatctcttaaataattacttaaatatcgtagcaacatgttctctgttgaacacaaatattagtatattcatttttgtagtgtacgtcaacgacattttcaaagttttttgtgtaaaaaaacgcttcttattcccttttatcatataagtgtctaatagttgtcataaatagtgttaaagcatttaaaaaggtataggaattataaagtttataacgcctataccttctgaaaagaaattataaaagcttgttacaccggatattcattcagccagcgactaccaatataacgttgcagcccctaagacattgcttggcgccttaattaccacaattttttcaaaatcagcagctacctactgacacaacataacacaacaatacactaactatcgtgtcatgtaatcttgcatccgatcttgcaacgctgtaaatgtttcgaagccatcctcttctaagaagtgccctccatcttccacgattcgcaagttcccctctaatgcattcattaaacgctgggtttctttatatgaaacgtatttgtcatttttagaactcaatccgtaaaaattgtcaactttctttttaatattatcgtaatcaatggttacattacttaaatcaatatctaaatctatattttctgcatcttctttaaagcccgctatactgaaaaagccttcaatcggctgatcaatcatttcaatatattttaaagctgtgattgaacctaaaccatgtgttacaaaatatgtatcctttttgcgtacattaatttgtttcgtcatagcttcaatccactgatcgactgtcttcgcttcaggggattcaaaattaaataatgttacgtcatatccttctaaagttaagttatgctctaaccactgataccaatgatttctactattaccatgcatagaatgtacaatgattacatctgtcatcacattctctcctttcaacttactacttctattctattttaaaaaaatgaatacttacctataattgtaaaataaaaacaccttaattagaaatcttttatcgcaaagtgacatttctaattaaagtgtattgtcatcatttcaatattattcaaaaacagctaaccctttgtctctgcttcaatttcatgaaataattcccgctgaaagtatcatgatttacacattacttccaccattatataacttaaaaatgactatatttcatcaaacattatctaaaggcatcacaccaacaccatccaacaattaacttacaactctgcgattacttcttcagcagcaactttaccttgtgtaatacaatcaggtagtccaaccgcttcaaaagatgcaccagttactctaagtcgtggatatgtttgtttaatatgtgcttgaatctgtctaatttgttgaatgtgaccaacatggtactgtggcatacttttcggcaaacgattgacaattgtaaattcaggatcgcctttaaatgtcatcatttgacttaaatctctacgtacaatcgatactaattcattatctatatgatcatcaaccacagtatcacctggtttacctacatacgcacgaatcaaaaccttaccttctggtgtagtaaatggccattttttcgatgtccaagtacatgcggtaatgtctgtatcactcgttctcgcaatcacgaagccagtaccatcataagtattttcaatgtctttttcatcaaatgccaatacaacagttgcaacagtcgtactatccatcgttttaaagtaatcaaatgctggatcttgtccgaaccaattcaaaaagacttgatgcggtgttgtcactaatattccatcgaatacatcttcttgttgattactgtaaacaattttatattgcttttgagatgtaataatatcatccactgacgtattgtaacgtattgtcacacctttatttttcacatcttgttctaatgcttcaataaatgaacttaaaccatgtttaaattgtttgaattgtccttttggtgcgccaggatataattgtctttgtttcagacgcttatttttctcatccttcataccttttatcagacttccgaatgcctcttctttttctttaaaattaggaaacgtactcatcaaacttaatttatcaatatcggtaccataaataccacccattaaaggctcaattaaattctcaagtacctcattacctaatcttgctctgaaaaatgcaccaacagaaatgtcaccgttctgcatttgagtaggttttttaagtaaatctaaccctgctcttaactttccaagtggtgaaattaatttagttgtcacaaacggtttgatatctgtcggaattcccataattgatccacctggaataggatacaatttgtttttcgcaaaaatataagattgtccagtcgtatttgtaacaatatcttgttctaatccaatatctttcgctaattctgtcatgatcgtttttctacctaaataagattcaggccctagttcaatcatataaccatctttacgatacgattgaatctttccccccggacgattcgatgcttcaaagatggttacatcaatattaggatcttgctgttttaaaaaatatgcacttgataaacctgttatccccgctcctataatagccactgatttagtcacaacgtttcacgcttctttcgtcattaaaatatagacttgatttcatcaacaattgcaccgataaataatggatgtgtattcggcatttttggacgataataattcgcaccaatatcatcgcaaacaactttacattcataatcattgtcataaagcacctctaaatgctcacatacaaaacctactggcgtatatataaagtttttatactgatgtttttcatataaatcacgtgttaaatcttgtacatctggccctaaccaaggtgtacctgtattaccttcagattgccaaccaatcgcgatatgttcaatattagattgttctttaattaaaagcgcagtatgttctagttcttgtggatatggatcattattcttttcgattaaaccttttggcaaactatgtgccgaaacaactaataccgtgtctttatgttcctcttccggtatttgagctaatgtttcgttgactttattcgtccaatattcaataaatttaggttgttcataataatgtttcacatgtgtaagttgaataccatattttgcagcttcttcatcagcacgtttgtcatatgatcctactgaaaatgaagaataatgtggtgctagtactacagtgattgcttcagtaatgccatcattgtgcatttgttcaaccgcatcttcgataaatggcgaaatatgttttaatcctaagtatagtttaaattcaacatctgcatatgctttatttaaagctgaaactagtgcatcagcctggtcatctgttgtacctgctaatggtgataaaccacctataaattcatatctatctttcaaatcttgaagttcttcttcagatggacgtttaccatgtctaatatctgtataatatggctctatgtcactttctttataaggtgtgccataagccataactaataatcccatttttttagtcattgataataccttcctttaaatgaattatctttcatgtgcttcaatgtaatactatgattatctttgtgtatatgtgtgtacgaattcgcttactttacgtaacgtctctggttgcacttctgggaaaacaccgtgtcctaaattaaagatgtgtttaccgttctccataccttgatctaatattggtttcaatctctcttcaatgacattccatggtgctaataaaattgatggatctaaattcccttgtaatgttttagtaacgcctaattgttgagcctgattaatagacgttctccaatctaggcctaatacatcaatcggcaaatcattccattcattaattaaatgactggcacctacaccgaataaaattaccggcacatcatgtttttctttaacctcactgattaatcgaatcatatgtggtttaatgtaacgtctgtaatcctcgacatttaatgcacctacccatgaatcgaaaatttgaatcaattcggcacctgcttcgacttgagctgttacatatttaacagatatatcaactaaatgattcattaaagcaaaccatgttgcttcatctctatacatcatcgcttttgtaaaattgtaatttttcgatggtccgccttcaatcatatatgacgctaatgtaaatggtgccccagtaaatcctattagcggtacatttaacttgtcttctgttaaaagtttaattgtatctaatacatatggtacatctcgttcggggtctatttgagaaagtttctcaacatcttgaattgttttgataggattatgaatcactggaccaatacccgatttaatttctacatcgacaccaattggctttaatggtgtcataatatctttgtataaaattgctgcatctgtatgataattatcaactggtaaatgtgtaacataagcgcacaactccggctgatgtgtaatatcgaatagtgaatatttttctttcaattttcgatattctggttgcgaacggccagcttgtcgcataaaccaaacaggtgtatgtgtcgtttcttcacctttaatcattttcaaaattgtattgtttttattatgcaccataaaggcctcctaaattaaaatcattcttatctatattatcatatcgctcattcgttcgtattttcaataaataaatgtcataaaactgacattaaattacacatcatttgtttgtgcatttaaattttaaaatcttgatggattatctccacatctttttgtcttgcatgacttattatagtaactttaaccgtatattaatagtggtaatgactagtttatcgtcgtataataaataaaaacaaaagggggacctttcatatgaagaaattatatacatcttatggcacatatggatttttaaatcagataaaaatcaataatccatctcatcatttattccaattttcaactgctgattcatcggtgattttttgaagagactgaagaaaatactgtactgaaatcaccttcaatatatgaagttattaaagaaataggcgcattcaatgaagatcatttttattgcgcaatttttattccgtcaactgaagaccatgtttatcaacttgaaaagaaattaatcagtgttgatgacaatttcaaaaactttggtggttttaaaagttatcgattgctgagacctgttaaaggtacaacttacaaaatttactttggctttgctgatcgacaaacttatgaagactttaaaaattctgatgcttttaaagatcatttttcaaaagaagcattaagtcattactttggttcaagcggacaacattcaagttattttgaaagatatttatacccaataaaagaatagattcgaagaaaacttccattggttatgctgttaacgtatagatgctaatgtaatctgaacgccgtatcatttggcgttcaacattacatgcacctttacaacatacatgccaatggaagttttttagtctcgtaataatgtttcctgatattttaactttttaataatacttctaatcgttaataaacctacaatatagaaaatgagtacaacatagaataacgtcatatgttttataataaatgtcactgaaaacacagtacaaataacaaacatcaatctatataaaaactgttcataccctttgattaccttctcttcaggtacaggccacacttgaggccataagccatatgcttgttgagaataaaattgtgccatttgtaacaatataatatatacaaataaacacccgataattgctgtcactaatggatatgataaccaaaccataagtaaaactgcaataattactaacctaaagataatattaaatgcgtctctccctcttaaaaaagcttctaataaataagaataaatacatcgcattagagttaaatttactaccctttggaactggtaaaagtatatctaaataacttcttctgactgcagattctttcaaatgtttcacatcggtaaacatattaacaaatttataataattcatatgatgtcgatgttcgatagcaatcattttctcccatggatacaaaaagcctggtttatattttttaactaaaaattctattaacacaggcaaagcaaccatcacaaatacgatgtaccattttggagctaatagtaagtaatatgttagagcaaagatgatgaatgatattaaattaacttgccatgttttaagtcccgattgataccattgccatcttaagcgtaaaccaacatatggaaaaattaacgcacttactccaaaacaaatataaaatgccacattatgttgattaatattgtaaaacaacgggaacattacaataacaataatgagttggattaatatgcgcgcaaagtaactatataaaatcgcatggcgcataaattgagacatgtgtttttcaaatggtaataaaaagattttatccgcttcttttaacagtggtcgcattggaaaaatggatgtcaacgcaacaatcactgctgctattaatgaaaaattgatattcgttggaatatgttttaaccattcaccatatccaaaaataaatgcacctagcaaaataagtaaaaagaccatgaaatgaccattaaatataaacttattataataatttttctctttacgaagggcatgtaatcttttattaaataatgtggtcgcttggttacgcatgtacatctccaccttgcgtcacatgaatatatatatcgtctaatgtttgattatgtaagccggtttgttgtctcaatgcttctaaatctccaaatgcaacgacttcaccttcgtctagtatgataaaacgatcacaataacgttcagctgttgctaaaatatgtgtactcattagaacggttctaccttcgtttttcttttcaaccattaaatctaacatggattgaattcctaatggatctaggccaaggaatggttcgtctataatatacaattcgggattaacgataaacgcacaaataatcatgactttttgtttcatccccttagaaaaatgactcggaaaaactttcaattcattttctaaacggaatgtctttaataatggcattgctcgattcatcgcttcatcacgatcaatatcatatgccattgctgtcatctcaatgtgttcctctaatgtgagttcttcataaataaccggtgattccggaatataagataactttcttctataagcctctatgtcatcattaatgttgatatctgaaattgatagagatccttccataggtgtaagcaatcctagcatatgtttaatcgtcgtactcttaccggcgccatttaggccaataagtccaacaatttcgcctttgtttaattcaaaatttatatctttaattacagggcgttttccatatccacctgtaagctgttctactttaactgtcataaggcacctccatgacttatattgtaccaaaaattataaaatgctcatattaaatatacatgtcctaatatcgaatttttagcgacaatgttataatgaatggtaatacaagttgaaaaggagtgtagtcatcatgtcagaaacaattttcggcaaaattttaactggagaaattcctagctttaaagtatatgaagacgattatgtctatgcctttttagatatatcacaagttactaaaggacatacgttattaattcctaaaaaagcttctgctaatatctttgaaactgatgaagaaacaatgaaacatatcggtgcagcattacctaaagtagcaaatgctattaagcgtgcatttaatcctgatggtttaaacattattcaaaataatggtgagtttgcagatcaatctgtatttcatattcatttccacttaattcctcgatatgaaaatgatattgatggatttggttataagtggaaaacacatgaagatattttagataacgatgcaaaacaacaaattgctgaacaaattcaagcacaattttaaatgtatgcttaatctaagctcgaacgggtataatatgattaatattataacaattgcgtttgaagtgataacatcaaggttagcaattttaaacaaaatgagttatcaagataacagatgttaaaagtgaggagaatataaatgaaagcatcacgcattctattcggtatcggtgttggcgtagcagctggttttgtagttgcacttcaaggacgagacgacaaaagtgtcaagaacaacacgatcgatcgtactgcccctactggtgcaaaatcagaactacaacgtgaatttgaaacgattaaacaaagttttaatgacattttaaactatggtgttcaaattaaaaacgaaagtgcggaatttggtagttcaattggtggtgaaattaagtcattacttggaaacttcaaatctgacatcaatcctaatattgaacgtttacagtcacacatcgaaaatttacaaaatcgtggcgaggatattggaaacgaaatttctaagtagcacgttacgttctcgatcacaactatttttattagtaacagcatatttattttttaaaattaaatgccaaataaacgagatgacattagaaattagatatttcttgtcatctcttttttataactcgaatgaacttatgtttacaaattacaggaagacgttgtttgtagtgatttttacttaaatcatatttatgaattaattgaaaacattgcttaggattcattgtgttatccttgcactttgattacgctttacttaaatcattatcgacaaacaacatacttatattttcattgaaccgaaccttataaacacattacatataccttacttgtacaaattattaatctggtgtttattatcattacatatcactatattttttagcatttgtatgacttagttggtcaaaagatgcttttgcatatgccctgccatatccattttttatattattcaagttttcaaatactcatgtcatacgcgcctttttcataagtgatgctttattagcaagaatatgtgttcgcagaaatttgttctgcattctacttctacgctagtcaatcagacaattttaccaatccccactttcgcgtttcaaatcaaacaatacgtcgcccctttcttcatatataacaattcttctaacatgatatgttactattgaattactgaacctgagttagttataatctaacttatattgaaaagagatgaggcgtaagatatgtttttatgtaaaagacaaattgatatcaatgcacgatttggtttgcctagaattgcttttatgagtgcagttgcaaccatcattatgtttttagtcagttatgaagtaatgtattttttatctaatacgccattatcagatagacattttctcatctttttattacttgtatttatgacgtatccattacataaaagtatacatttattatttttcttaccatatagaaaatcgtttaaagttcataagttgactaaaagaaaatggcttatattctataatacctacgtcaatcaacctgtacacaaattttatttttgcattaacttaatattgccgttaattatcttatctgcaatgttcgtttatctaacaatttcattcccgcaatatggacattattttatgttcttattggcattgaatttcggtatttccattacggatttattatatttaaaaataattatattttctaattatggacaatatatagaagaacatagtacaggtattaatattttgaaaaaaattaaaaatccatatcatttataacaaaataattatagcaaggtgttattatttgtttttaggctatgtaatagcttacaatcaaatgtatatagaccttgtttttttattttcatcaattactacccctaaacctaatgctctagtctgatgtcatgggttattgattggtgataatataaaactatgttatattcacgatgattaacttacaaaggagtttcaactatgaagatgataaacaaattaatcgttccggtaacagctagtgctctattattaggcgcttgtggcgctagtgccacagattctaaagaaaatacattaatttcttctaaagctggagatgtaacagttgcagatacaatgaaaaaaatcggtaaagatcaaattgcaaatgcatcatttactgaaatgttaaataaaattttagctgataaatataaaaataaagttaatgataagaagattgacgaacaaattgaaaaaatgcaaaagcaatacggcggtaaagataaatttgaaaaggcccttcaacagcaaggtttaacagccgataaatataaagaaaatttacgtactgctgcttatcataaagaattactatcagataaaattaaaatctctgattctgaaattaaagaagacagcaagaaagcttcacacattttaattaaagttaaatctaagaaaagcgacaaagaaggcttagatgataaagaagcgaaacaaaaagctgaagaaattcaaaaagaagtttcaaaagatccaagtaaatttggtgaaatcgctaaaaaagaatcaatggatactggttcagctaaaaaagatggcgaattaggttatgttcttaaaggacaaactgataaagattttgaaaaagcactatttaaacttaaagatggtgaagtatcagacgttgttaaatcaagctttggatatcatattattaaagctgataaaccaacagactttaacagtgaaaaacaaagcctgaaagaaaaattagtcgatcagaaagtacaaaaaaatccaaaattattaactgatgcatacaaagatctattaaaagaatacgatgttgactttaaagatcgtgatattaaatcagttgtcgaagataaaatcttaaaccctgaaaaacttaaacaaggtggcgcacaaggcggacaatccggcatgagccaataacacaaaaccgagcgaccgtggttcaaaaatcataccacggccgctcggttttttcgcattaaaaatcggacagatgagctcatgtttcagtatactcatctgtccgatatcttttaattcttaatcgagtgattcaggattgtagaatctacgattttcaagaccaaatattttatctgtaaactgacccttgtcagtttttttataagccttttcaaacatattcattctagcatctatattatcgatatagcataaaatttctgcttcttttaagtatggcagttttggcgaaccatactctaacttaccatgatgagataaaatcatatgtcttaacaacatgatttcttctccttcaatgttcaattcacgagctgcttcaactacttcatcactcgcaatcgagatgtgtcctaataagttaccttcgactgtatacgacgtcgcaacaggaccactcaattctctaactttaccaatatcatgcaaaataataccactatataacaaacttttgtttaacaatggataaatgtcacaaattgattttgcaatacgtaacatcgttaatacatgatagcttaagccactcgcaaagttatgatgatgagaactagcagctggatatgtgtaaaatcgttcttgatattttttcaataaatgacgtgttatacgttgtaaattagcattttcaatatctagcaaataatgagaaatctcttcttgtatttctgccggtgataaaggtgcaccatctacaaattgttctgtttttaattgatcttcagttgtcgctagtctaatttggttgactttcatctgtttatttccgcgatagtttatgatgtcacctttaacatgtacaatttcttcaggcttgattgttgctatatcattttttgtagccgtccaaaatttcgcttcaatttcaccacttttatcttgcaaatgtaatgtcatataatctttaccttgtgctgttacaccctgtgtagctttatgcactaagaaaaagtgatcaactgaatctccgggatttagattctctatatttctcatcgtttcccgccttcctctattttgtttaatgtaatcacttcttttgatggaacaatattatcttttacacatgtaaagtatagtacttgatagtgttctgataatgatcgtaaataattcaacattttttcagtacgttttttatcaaaatgaacaaatgcatcatcaacaattaatgggaacggataatatggtcgtagtaccttaattaaactgatacgtaaagctacataaagtaattcttttgtagattgacttagttcaacaggatcatataattgaccattaacatgtttaaccgtaattgaatcttcattatagttaatcatcgtatatctgccatctgttaaatgcttcaatatttctaccgcttcattaataacttgaggcaaacgtttatctttaatttgtttaatgtgttcatcaactaaactttgtaaataacttaaacttgcccaatcttttgcgatatcattaagttgatttttaagactgtgatattcatgtcttaaattagcaagcgttgtatcagtttccatgtgattgatttgtgcacttaaatcactgacttgtgcttgcatttcaagatattgctcattatattcgtcaacttgagtagccaataaatgatcttcttcttcaagttgtgctgttgttttttcacttaaactagaacttaattcataagaatagttttggttctcaagatatttagttaaatcattaaaacgactcaaattactaatataagtttggtaatcttcatgatgttggtaaaaatcttcttcagtaccaacattgataaaatcgaatagtgctgtaatttctttattattttcttctaattgagcatttaaatgatttaattcatttgtaacaagtttggtattttcagcattaatacgccatttttcattcgtgtcttcagctgatttcaaccattgttgcacatcgtggaataaagataatttgttgaaataaacaaattgtgattttgtaacagcttcagcatgattgtagaatgtatctaattcttgaaccaattgctggcgttgttgatttaaatcactgatatgttgatctaatgctttaatattcgccattgtagaaatactatcaacaattaaatcatttgaaattttagatgataagtataattcatccttaacgttttcaactgtcgattgcaattcatcatgacgccctttcgcatcatttaaacgaccttcaatatactgacgtttctcttctaaaatatctttatttttcaaagcttgttgccagtgatctcgaatgcgatattgctcatcaagatcaaaatctaagtcatagttttcatctaaaatggctagttgtgctttaatttcttcgatttcatctgtgatggcctcgctataatctacttcttttgatttagacatgatgataccgataacaaatactaaagttaatactgcgaaaataataccaaacaacatgttatttgaaataaatgagaaggcagttaaaccaatacctactaatgttaaaagaataaacgttgttcgtaacaatttttgacgtttttgtttttcttgttgctcaatttcgaaacgttctttcaatttgctatacaagttctctttttcgtttaattcaatgacttgttgtgagtattcttttttcttttcaaaagtctcttcaggaactattttttcttcaacagaatctagttcgctatgaaccgcattatcttcgattttattttcttctaaactacgttctaattgcttaatgtatgccgcttgttcttgtttattcttgatttgctcactgacataacttttcattgcctcagaactatctacgtcatgatgcgtttcagaccaaccaatatttgcttgcaattcatctttatcacgttgtttattcgcaatatccttttcgattgcagtaagttcaaattctttatttttaatttcattttcttgttgattcaaactaatgaaggcgtcaatatcagattgtttaactggctctaattgagtcgcttcttctttaagttgagctaaacgctcatttcttaaaccaatatctctttctaacgattgcttatgcgctcgtgctttttcgtaacgatccacacctttttctgggaatgtgattggctcaatatttaactgttgttctagagacttccattcttgtgaatgatcatgtaaagcaacctctttttgtttttcttcatgcatttttgataattgatttaaattatgctttaaattctctaatcgacgtgatgatttatctcgatcatctactaagcgatgatatgtttctagtttagcttcttcttcacgaatttgactttctagttgttttaattgctcaatttgttgattaatgattggatttttacctgattttttatataattcatcttttttacgattaatcacttcgcgcattgacgtgaattcagttgatcctaaagcccctgcttgtaataaataatcttgcaattgtttttcatttaggtttctatgaatgtcttgaagccctagtacatcaaatgaaaagataccttgatatgtctttttagaaatataattaagtttcttttgtaaccaagcatcatcacgcacagcaccattaggtaaatatactttcacatcaccttgagcactgcctttaattcgttcaacttcaatctctaagccatcatcaagaataagtactaatttaccaccgtattggttacctagacgtggttctagtcttggctctttagactttttagttggaaaaccaaataatatcgaatggatgaatgcttgaatcgtcgatttacccgcttcattttcaccaaaaatttcagtgaagtttttattaaattcaattttacgttgaacaaattgaccgtaaccataaatttcaagtgatttaattatcattttgttcacctctcatttcagcttttaatatttcttcagcacgattaactaatgctgtatggtcgaatgttccataatcatctaggaacttagatgcccttggatttaaatataagtctgacatcgctttatcaaaaacagtttgatcgactaataattccgctgaaaattcattaactaaaggtgattcatcattttgtgcatattgtatttttaactcatcaatatatacaaattgattttcgttttcttcataatctgtaatcatttcttcaacttgtaataaatcttgaggtgaaattaatgtctcactattaataacaagcgttaaacgataaaaggcttttccttcttctctcacttgttgtttaaagctttgaatgacctcgtataaaccttgcttagatgtcttatccgtttcaatagttgcttcttcaaatctaatatactgtgtaggataaaatttagtttttaattttaagtggtcaccctcgattaataagcaacctttttcaccttgctcattaaaatgtctaccttgaatattacctgaatagttaattacaggcatatcacttaattgttgacgttcatgtatatgacctaaagcccaataatgatacaatttactgtttaaatcttctaaaatgaactcggtatatctttcgttaactgaagatttactgtacgtaccatgcaagacaccaatatgtatgcctttttggccttgacttgatggatattcatcaatcttgttctcataacttgctctattctcataactaaatccgtgaatataaattgtttcaccagatttagtaattgcttcatacgtctcaactttatttgaaaatacagaaacattatctggccagtttgatgaaatctttgatgataatgggtcgtgattaccatgacaaacataaacaaagatttgttcattttgtaaacgttcaaattgctgttttaagaaaatttcagcacgtaatgttctgttttcactatcaaataaatcacccgcgataattacaaaatcaacatcttgttgtaatgcaatatctacaatgtttttaaaactttcataagcacttttttgaacatcctcaaaaattttagggcttatatgactcttagatttgaaaggactatctaaatgtaaatccgaacaatgaataaatttaaccatacatccatatctccttaattaaaggttctaacatcaattttgcaaaatccaactatacaaagcattctaatcactatattcattcttataggtgtagtgattcattagctgatttattaaaaccagtcgccatttttatttgtatttcgttaaaaaattattatctacacaataataaagtgctttagtcaaatcgtgatgttttatttattaacaagtttattatttcttcattttaccataatacgcttcatatcgtcgatgaacatatgaaattgagacacatttataacagtttaaaattttatttgtagcgtacgctgatttttttcaaaaatttaagtcggaaatgcaatttccgtagttgttaacaccgctagtaaaccaactgacacattatagatttacatgattactctactagatttgctcggcagtaatgacaaattagaagctaaatgtcaaaactatcattgcacttaatacgccaaacattttcaggccgttcttaataagtcattaaaagtgaaacacttttccatcagtccgatacatgaccgaactaatagtattatgttgaaaactttacactacaaaatgcaaaaaggaagttaggacacgtttactagcctaacttccggtactgaacgcatttgcccaatttgacagagagcctctaacttccgttatcaagctcatccgcccgttttggcatagagccaacattgtttgattgcccagcttccgtcgtccgttctgagctagagctaggacatgtttgataacctaacttccgatactgaacgcatctgcccaatttgacatagaacctctaacttccgttatcaaaactaaaaaaactacccacaaagtctcggactctgtcggcagtctattcctctatttaaaggattgaaaaatattagtcagcgtaaatttcgtctaatggtttaacgataatttgattgatttcttggaatacttgactcattttttgttcagcattcattaatgcagagatgttttcatctttttcaattgcttgcgcttgttcttgcgctttttgtaaatcttcttcagcaatttcttcaccttgcatttgtttttgttggaagttaatttgagtttcacggaactcgtcgaataactttttagattcttcgttagcttttacattagcgaatgcttctttgattgctttgtattcttcgctttctcttaaagcttgttctaattgatttgcataatcatataaatttactgccatggttatagcactcctttgttgtgatgtttattaaaacgttcgatattactttaccacatctcgcttttttagacaaagattgcaaccaaaccttggaaaaatccaataataccacctaaaatgaaacctaatgacataatcaactttagttctttgttagcaatttctataattaatttttcaatataatctaagtcaaacgtattaatttgttcttcaattaatcctcgtaaatccacttttttcataattgtagataagtgaatcgataattgttcaatgattaaatttgctaatttgctagagagttgaccttctaaataatcaacgaattgaggcattaacgtaaccactggcttattcgcttgtttgcttgcacatgttgttacatacactgatagattttcagcgatttcattaaactgcgacgcatctaacagttcattcaatggtttatctttaaaagtttgatattcattggtaattaacgatgtcacaattgctcttgctttaggatgagatgttaaacgtataagttcttgttgaattcgatctgcaatgctctcttttgtcataaacatttgcaacataccaattaacttacctttctcattgaaaaaagtatccaacatatcattaatatcttgtgtgccttttgcagatgataaataatttcttgcacgatcacataataagtctgttgcgttatctacatgctgatctaaaaatgttacaagttgatttggcaataaagatgctattgtttggttttgatgctttgtataataattattcaattgtgatgcaatatattgatttccattagtttgtaatacttgttctaaatcaatatcgatttgagaagtaatttgtttaattgacaattgatctttcgtcaacttttgtaactgctgttgaatcatagattctattgcttgctgtgattgctcactttttaatttttcattaattaaagtttctgtaagcaaatgctcttcaatcacttggccaattttagttgcaatttcttcgcgtcttttcggtattaaacctggtgtaaatgggactctaaatttaaatatatagtatggtttaaaggggtgaaacagcattctaattgcaattacattagtaatgccaccaattatcgcccctactacaatcataaatatgataataaatagtgcattcataattttgactcctttgtgacaacatagttattcattataccactatttttattttttaattcattaatcatttcactttctgctcaatttattattagtttacatacaaaaagcgatgcctcacctctcgaaacaggtgtgttacatcgcttttattatttattaaaagtatataggcctagatatgtactaattcttctttagcatttctgttaaagtatgtttcagcttctctcattttagaagtaccgaaaattggttggttatctggatttaatacacgataaatattgcttactttgttactttgtaaaatgtacccattacgagtctcaatgttattccaataaatatcacttgttggtgcatggtttggatatgcacagtgatttcttgaaattgtttgaacgatttctaatggatcacagccaaatgtactgtttaatacttcagagtctctgaataatgcacaaattgaaatgcaagttgtccagtttggtaatactctctctttttcgatttgtactaaagtctttttagaaagtccaattgtttgcgccatagtatcttgcgtataaccagcctctatacgaaccattttaaattttgtttgaattaaatctgtaaaactctgtctatccattctgttatctacctttctgtttggggaattttatccggacacaagaaattgcaataatacacatttcttgaaacacagattacatcttaatatatttttaataaaatgaaaagagtcaatttcacatttgtattaaattttgatcaagtcaacaagagttaagtttactttataatgaagcgaaagtaaatgaagtaaaattttatgcataatcactagatttgataaaacttacacttttataatgatatcaaatttacaaagaaaactgtataataaaccctatcgctataaaaaaatcatcaaaatcagattaaaaattgtctatttttcgacaaatatttaaaagctcattctaaatcaacttattttccattgcataaattgctgcttgtgtacgatcgctaacttgtaatttactaaatatatgactgacatgtgttttaattgttttttcagatacaaataaagtttctgctatctctttatttgttttacctttaaccatttcacgtaacacttcaatttctctctttgacaacttattcgtgtagtgtggtttttggctaactgtttcgaatacatcttgtgccttaggatgtatcattttttcaccgttcataactcgtctaatagtttcaattaactgctgaggctcaacgtctttcatttcatatccatcagcacctttattgattgctgaaattacatgttcatcatcaacataacttgttaataccaaaactttaatatccggataatgtgccttaatatattccgtaatttcaataccattcatgccaggcatcactaaatctaatagcacaatatcagggtgctcatgctcttttaaatattctaaaaatgtttctccatctgcaaagtcttgtaaaacttctatgttttcaatcgtggataataaaaatcgcaatccttgtcgcacaatataatggtcatctactaatattactttgttcatgggttatctccttaaatcaagctattttataggaattgtgaattgtatttgtgtaccctttgttggctgagaatgaaaggttactttacctcttaataatttaactctttgttttatgttatttataccgtgtgatgaagctatctgaacattatcgatctcaaatccttgaccataatcaatcacgtctatatatagtatatcgttcatttgttttaatgtaagatccattttattcgtatcagcatgtttcttaacattattaatacactcttgtaatgctctgtatatgttttcttcgatttcattagataaatcgattaaaccttctacatttacatttaattgtatatgcattaatttactatatgctgtcaaagcatgaattaaaccttgctcaagtccaactggcttaagttgccaaatcaatgcacgcatttcattaacggcattttgactcgtttcctcaatcgtcttgaatgcttgtttagcgatggattcgtttgacatgccatacgcagcatgtgctgttagttttacagaaaataacatttgatttactgaatcatgtaaatctctagctaaacgattacgttcattaatttttgctgcttctttttcacggtctgttaaataaatacgtttgatggctgaccctaattgaaatgcgacagactctagcaactctaaatcttcatcactatatatttcagtatttggtgacgctacatttaaaatgccgaattgttcttgacccgatttaagtggtaccgttgcatgatgtgtaatattatcattttgactaggaaatgctttagaggctaagttaatacgagaacaattgacgatattcgacgctttcattagcctacgttgattaaatgctttcacacaccaacaagacccatctttaatatagtgacagtggtctgctgtcaaagattgtggtaaagccacatgtgatacaagttcatgttcacctacgctattgatgaaaaatatccagcctgtcgtgaaattactgccctcaattaaatattttaacgcaccttgggtcatgctatacatttcagtttcttcgtttaaaaattcggcaatctcttttaataaagctagtcgcgtcctttgttccatcaaatcgctccaattcatttttacgtgtattaactattatacattgagttattatatttttaaatcttagacgtgaacatgataaaatggccttgattacttaatagttatatttcggagaactgatttgtgatatgatattaaagactataggaggattttatgaaatttaaaataccagaaaactttaatgacttaagtttacgagatattttccaacaacttaaggtacctaaaaaagatttacatcatttaaatatgtctaaagatattactattaatgataaacctgcgcgattaatggaaaaagtgcatactggcgacgatgtatttgttccaaccattgatgaaaaaagtaattatgttccaagttatcgttatgcacaaattaaatacgaagacgatgatatggcaatcgtaatgaaacctaaaggtgttaagacccaccctaatgatttaaaagaaagcaatactttaatgaatcatgtgatttacacggttgatagtgactatgtcgaaccaattcatcgactggaccaggaaacagtaggattattaattgttgctaaaaatcctttaatgaaaaaaattcttgatcgcatgttagaagacaatgatattacgcggatatacaaagcaaatgttaaggcacttttacctttaaaaccacaaacgattgatatgccaattggtaaagataaattccattcgaataaacgacgtgtgtctcctactggacagcgtgcaattacacacattttaacttcaaaaatgataaaagaaactgtgtgccaacttgaaatcaagttggatactggacgtactcatcaaattcgtgtgcatttagctgaaattggtcacccagttattggtgatcctttatacggtgattcaacgttaagacaattagaacttgaaagttacaaaatagagtttgtgcatcccttaactaaggaagtcatttccgtttctttggatgactaatttgattagtttggcatgatatttaaacatgcaataccgcattgtaactaaatcaagtatcaacttaaatcggatagatggaaaatcattaattttttcagatgttcggtttttttatgtttttacgatgcttaggattttatattttgatattttagtaatttttcattttatagcatccttggataatgacttgtagtctttttcaactgtgttacgtgtatctatggacaatacatgacatcataagatttttatcacaggttgtttggccaatacatgtacaacaattcatcatataaaaaataggttctataataaaacggactccatgaaaagtttttcctttcatggctctatatcaaatcggacttataagttcaatttgacatagacaaaaaaataaagcttgaacactacatctacctgtaatgcccaaactttattttatattaatatttaattaatgaggatctaccatatcttctggtttaatccatgcttcaaattgttcttctgtaacatatccagtttgaattgcagattcttttaaagttaaaccttctttatgggctttcttagcaatttgagcagctttttcataaccaatatgtggatttaatgcagtaactaacattaatgattgatttaaataattatcaatattctcttcgattggttcaatgcccactgcacaattgttattaaatgtttccataccgtcagctaaaaggtaaattgattgtagtgtattatgcataataactggtttataaacattcaattcaaagttaccttgtgaacttgcgaagccaacaactgtatcattacccattacttggactgcaaccattgttaacatttcacattgtgtaggattaactttaccaggcataattgatgaacctggttcattttcagggatagaaatttctgccaaaccagctcgtggccctgaagccaaccatctcacatcattagcaattttcattaagtctcctgctagcgccttcaatgttccatgtagttgtattacttcatcatgtgctgttaatgcatggaatttattttcagaagatacaaatggataacccgtattttctgaaatataatgtgccactttatcaccaaattcaggatgcgcattaataccagtaccaacagccgtaccaccgatggcaagatttaaaatgtgcttcttagattcagataacattgtttcgcaacggtcaagcatataacgccagccactaatctcttgtcctagtttgatcggcgttgcatcttgtaaatgtgtacgaccaattttaataattgaatcaaatttatcttctttttctttcaaagtatttcttaaaagttttaatgcaggttctaattttgtttcaacttcttgatataatgcaacgtgcatagcagttgggaatgtatcattcgaactttgtgatttatttacatcatcatttgggtggatactttcatcactttgatgattttttaaatacatattagcaacataacttactacttcgttcacattcatattactttgtgtaccgcttcctgtttgccatacaactaatgggaagtgttcatctaattcacctgataaaatttgatcacatgcgtatacaatggcatctttctttgcctcgcttaattttcctaaatcaaaattagctaatgctgctgcacgctttagttgtgcaaaaccataaactacttcgattggcatacgctctttaccaactgggaaattgcgtttacttctttctgtttgagcaccccaatatttatctgcaggtacttctatttctccaaaagtatcatgttcaattcttactgacattcaatttctccccttatcactgtttatttaactgtagtatatcattaattaatttaattgagcaatttatgattaaaacgttttcatattttgaaataaaaatacactaatcgcacgtgcccaccctttattacagtgatacggtcatacgattagtgtgttatctatcattatttagttattgttgaactaagtttaattacgatactttgttttagtagcttcaaccgtagcaatagctgtaagtatatataatacagcactaacaattgtcgtatatggatttagagcaacaagcgtacctaatactcctgttaaactcgcataaaaaccatcaagtgtataatacaatattcctgttattaataaacaacaaattacacttattacaatacctgattgattacttttaatgaatgtttgcgcattaacatcatcgattaatccttttgataaattgagttgtaatttaattactttgaaaataacaggtaaatataatgccccaattgccaatggaaaagctttaattgatattaaacttataataactgttgctatcaataattgaatccagtattttcctaacataaatatataaatctcctctaatttcattcttcaatagcatatcataatcttgtcatattaagaaacgcggtttaatgatttcattaaaaatattactgatagatgacttctttcaattatgtctgaagtaattaattatcaattccgtttaaatgttgttttaaaatttaaaattgaatttttgatatattactatgtcttgtacacaaatcaatgttttatgctctacaaagttatattggcagtagttgactgcgggcctcaacatagaagcttcggtatgtcagcttactatttcatgcaagttggcagggttccaacatagtagaattggattcccaatttctacagacattgcaagttggagaaacgggcccaacacagcgaaattggatttctaatttctacagacgatgcaagttgacggggccacaacatagtgaaattggatcctcaatttctacagacgatgcaagttggggaaacgggcccaacacagaaactggcggaaagtcagcttctatgaatataataaaaaagctaggtaacaaaatgctacctaacttcatattcaagattatcaatcctatttgatataggttttatactattcattgtttacatgataaatagctgtatattacacaattataatactttactgactgtcttcttcagaattcttttcttgatcattttgatcagaaatttgttccatttctttacctaattcttttaaatcttcaaaatcagttaccatactgttttcttcttcatgataatttaattttggatctttgtctttagacataatcaatacctcacagatttttaattaagcaaagcgtgacgtaaagtaagctttaacatcttcaggtaaacctgcagccgcttctttatcaagaataacatttaccattctatgtgcttttaaatcggctggttcgaagcttgttttaccattttcttgatataatttttcaactacatctcgtttattagcaccagtcactactaagaaaatttctcttgcttccattagtccttgacgaatactaacatttaacttaccttgctcatcgatagaaacaacttgtaatgttaatttccctttattttctttagttttaatcttatcagcgattaattcgattgcatctttttcataagcaattggataaacttgacctgctggtacacctaacgcttcaaaatatgattttttatcgtcataatctaaaatatttatttggctaaaatcaacagcatgtttttcaatatttttctttaattcatctagtactggcgcttgatcagtatctaaatgaaaacctgcaattgtagtaggattattgttaaattgctttctaataatatcagcagcatattctgctacaagttgactattgtcaaagactttaaagttcattgccatgatttctacactcctcttagtttgcattttacataaaaacggcgatattaataattattataccctaactttcaatatatcaaaccacttaactttaacatgcttatactctaaatatagcacttaagcatcattttttataatgaaaatgagtaaattttaattcaatcctggaaaatcttgttgacgtaacgcttcataaattaacaacgcagcagtatttgataaatttaatgaacgaatatgttcactcataggaattcttaacgctgtgtcttgatatttctctttcacccagtctggtaatcctgtcgtttcttttccaaaaatgaagtaaaaatctttgtcatgatttgaaaaatcaaaatcactataagtctttttaccaaattttgttaataagtaatactcgccatttgtggcttcaaaaaatgcttcaatactatcatgatacgtaatattcacaaattcccaataatctaaaccggctctttttaacattttatcatcagttctaaatccaagaggtttaattaaatgtaaatgtgtgtttgtacctgcacacgtacgtgcaatgttaccagtattagctgggatttctggttgatataaaacgatatgatttgtcatattactattctctccttgtgtccaatccttttatcatttcattctgaacttctgcatcctcttgatcataatttgcattgataaaatctcttgcttcttccccaagaatttgaccaatagcccaataagcagttgctcgaatcatcggtctttcatctgttgttgcaacttttttcaattctggaattgcatccacttcattaaaatgcgccaatgctaaaatagcatttcgttgtatcggttttttaccacgccaagcacctgcaagatgaccatatgtttgtttgaattctttattagacatacgtagtaaaggtactaatcttggctttaaaatttctggttccaaaatgatgtcatcttgttcggtattaatacctctatttttcgggcaaacttgttgacacgtatcgcaaccatataatctattcccaattttataacgatattggtcaggcatatagccttttgtttgcgttaaaaaactaatgcatttctgactatttaattggccatttccaactaatgcacttgttggacaacgatcaacacaaattgtacaatcaccacagctatctaataatggatcatcaggttcaaaaggtatactgactaacatttcaccgaggtatgtccatgttcctagtttaggattgatgacaaagccattacgaccgacaaatcctaaacctgcacgttctgctactgccctatctgataatacacccgtatctaccatagatttgatttcaacatctggaactttagattcaataaatgcagctaacatgtctaatcgtttacgcataattgtatgataatcttgaccccacgatgctctagcaaataagcctctgcgatcacctctaatactcttaggtgcacctttcagtttgttaggataaccaactgcaattgctatgattgaccttgctgttggtaaggataatttaggctccgttcgtaaagcaatatcagattcttcaaatcctgaggcataaccatttgcatgatatgcttctagcttttgcttcaattcatcaaagggatcggcagtagtaaatccaatactgtcgataccaattgtatatgcatagtcaatgatatcttgctttaactgctttgtatccaatcgtatgccccccataaaataatactatgttattttaacacaaccattattcatattgaggtttcatttcacataattttaataataaaaagcttgaatatatgatataactttgtggtgcgcatcatatattcaagcttcgttaggttgttataatactcttgctaagaaattttgtgttctttcatgttgcggttgttcaaatatttcgactggtgtgcctgactctacgacaacgccatctgccataaatatgactttatcacttacatctttggcaaatcccatttcatgtgtcacaaccaccatggtcataccttctttggctaggtctttcattacttttaatacatcaccaactacctcaggatctaatgctgaagttggttcatcgaataaaataacatctggatgcattgctaaagctcttgcaattgctaccctttgtttttgaccacctgataattgattcggatatacatctgctttttcttttaatcccactttatctaataacgacaatgcttccttatgcaattcatcgttattatctttctttaataatttaggagctaaaataatattatcgacaacttttttatgtggaaataggttgaagttttgaaataccatacccattttttgacgtagtttatctacttgtgtccctttttccgttaagtcattgccttcaaaaatcacttgacctttagtgggtacttctaataaattcatacatcttaacaatgtacttttaccactaccagatggacctattattgctactacttccccttgattgatttcaagattgatatcttttaaaacttcattatctccaaaaactttattaagattgtttattttaatcactggcattcaatctcccttcaatcatgttcataatgcgtgtaagtacaaatgttaagacaaagtataatgctgctgccgctagtaatggtgtgaatgggtcaaatgaaataccttgaaccacttgtgcattaaacataatttcgccaactccaattgttgacacaatagatgattctttaattaaagtgacaaattcattacctaaagctggtaaaatgtttttaattgcttgtggcataattacacttttcatcgtttgtctataattcaaacctagactacgtgcggcttccatttggcctttatcaacagcgtttatacctgcacgaataatttcagcaatgtaagctgaggaattaataactaatgcaattgttccacaaacaagagctgaaatatctagtcctaatgcagcagttataccaaagaatacgataaatacttgaactaacattggtgttcctcttaatatttcgatatagatagaggcaatccatgaaataatttttattttacttaatttcattaacgcaacgaatgcacctaaaatagaacctaatgcaacaccgataagtgaaattaatattgtaatcttaattcctttcaagaaaaaactaccatacttagaaataaaaccactgtcatcattcatcgcatttgcagcattagtcatatatttatcgattaatcctttatctttaacctctttaatcgttttattaatttgtgacaataattttggtgaatcttttggcactgctatcactgtatctttttcttcttcattaaatttcacattggaaattcctaatttaggattttgttttaaatatgcttctgctacaggtttttcaactacagcaccttcaacctttccacttttcagagctaatataacgtctggtaaacggcttaatgaagtaatagatgcattttcaatttcggtttgagcgattttttcttgttcagttcccttttgtgcccctacttttttattattaaagtctttgatatctttatattcattaactttatctttctttacaagcatgatatttttagtcatcatatatgaatctgaaaaatcaacttgcttcttacgttcaggcgttgaagtcattccggaaataataatatcaatttttccagttttaagagctcctaacaaactatcaaatgacatattgacgatttttaattttaaattattatctttcgcaatttttttagctaaatcaatatctacacctgcatactcagtcttaccattaactgtatgctcaaattccattggtgcataatctgcagaaagacccactctaagttcaccgcgttctttaatcttctcccatgtttgatcttgttcagcatgtgctgtgggattgatatacaccatagcactgctaattaacaaccctaatactaatataaacctaaataaacacttcatttatacagccctccctaattaatattcataattatacatattaatacattttgatgcaatagtgttttataaatgtatttttatcaatataaagaaaagcttctttttaaaagactgtacttaaaaatcgcctattatacgcgaacaattattacattttaaaatcaatcaaaaaaagcgctactatcaatatcttattgacagtaacgcctatatttatcatatattaaaacttattcttgtgatcaagctataaattattgttttggaacttcaaatttataaatatcattagaatatataggaatgaattttttacacaattcatgaacaataaatgccgatacaaatggtatgacaaaataaccaagtgctaataaaataatattcattgttggatcacctgacattcggttaaatgcatttattgggccaactaatcctgtatatccaaatccagcagacaatggtgttcctttaacctgaagaacgtaagcaatgattccagtaattattccatttatagtcaatggtatcgaaataattaaatttttcaagtaaactgggatcatcatttttgcagctcctatgagtaaaactgcatttacaccaatagaattgacacgcaatgagccaaataagaaagtaacacaggcagccactatacctaggtttgctgctccacttcctagcccgtttaaactaattgcagttgcaatcgctactaacgatattggtgttaccattaataatgaaaatgccacactaataagtatagacattaacaacggatttaagtctgtaaaagaatgaattacatttccaattgcttgagtaatttttcgaatgtaaggtaatgtgattagaccgatacccccactaacgataggtactaaaactggtaatataattaattcaaaagatccaagtttgttttgtaataccatatatataagacatgcaataataacaaccaaactcgtatttataatatcacctataccttttaacataaaactattattgctatatacaacagcacctgaaccaatcatagctgatgtacctactatagcagcacctgcgccattaaatttaaattgatgagcagctaaaaccccaataataaatgccataaatgattgaattagtatcactaactgatacgttaattctaaaatttcattaccacttttaaatatttttaatacttcacctaataaagcattcggaacaagtgcaataacaacaccagcaccaatagaatttaaaatcttactgaaaaactgtttattatcagcattctttgcgttactcataaacgacctccaatttgaacattaaactcatcatattatagaaaattaactttaacaatgattagttggctaatttaatctaaatataacaatccacaaaaggaataaagtaaatttgaacaatctactcagtaaacaatgttatgttaattttaaaatactactaattacatcctgtgactaataatgtaataaattgtaaatattaaaatagtcatattactattaagatagataaattgaatcgacttggtataaagcagaataaaatagcacttttacaaatattttattagaaaagttgaaacaaatacataaccccagataatatagtcataatcattaatgtaatatcaaaaaaagaagttaaacaatgtatagttgcttaacttcctatattgaacgcatcattacaatttgacatagagctaaaataaaaagaaaccttattttacaaggtttctagtaggttatgttatgtaaataacagttaattataccggtggtcggggtcgaaccgacactccacaagtggaacgggattttgagtcccgcgcgtctgccaattccgccacaccggcttaatggtaaacaaaaaacttccctttggaagcaattatggagcggaagataggatttacacctatacctcgttccgggaaggaacgtgttctaaaagttgaaatactcccgcaaatattaaattatggagcggaagataggattttcacctatacctcattccaggaaggaatgtattctaagagttgaaatactcccgcattattattaaattatggagcggaagataggatttgcacctatacctcgttccgggaaggaacgtgttctaaaagttgaactactcccgcataaacctggaggcggcaaccggatttgaaccggtgataaaggttttgcagacctctgccttaccacttggctatgccgccaataactgggctagctggattcgaaccaacgagtgacggagtcaaagtccgttgccttaccgcttggctatagcccattaataataagggcggctgaaggggatcgaaccctcgaatgtcggaaccacaatccgatgtgttaaccacttcaccacagccgccatggcaggggcagtaggaatcgaacccacaccaaaggttttggagacctctattctaccgttgaactatgcccctattaaaaataataaatggaggggggcagattcgaactgccgaacccgaaggagcggatttacagtccgccgcgtttagccacttcgctacctctccataaatggtgccggccagaggacttgaacccccaacctactgattacaagtcagttgctctaccaattgagctaggccggctaagaaatggttcaggacagagtcgaactgccgacacatggagcttcaatccattgctctaccaactgagctactgaaccataataaagatgtaatgatggcggtctcgacgggaatcgaacccgcgatctcctgcgtgacaggcaggcgtgttaaccgctacactacgagacctataaaatattgcgggaggcggatttgaaccaccgaccttcgggttatgagcccgacgagctaccgaactgctccatcccgcgataataaaaaataatggcggaggaagagggattcgaacccccgcggcccgttaaggccctgtcggttttcaagaccgatcccttcagccggacttgggtattcctccattattataggtaaatcgctattaattataaaattaaatggcggtctcgacgggaatcgaacccgcgatctcctgcgtgacaggcaggcgtgttaaccgctacactacgagaccattagtaaaacggaggaagagggattcgaacccccgcgagccgttaagcccctgtcggttttcaagaccgatcccttcagccggacttgggtattcctccaaaattatatggaccttgcaggactcgaacctgcgaccgaacggttatgagccgttagctctaaccaactgagctaaaggtcctaaatataattttacaactaataaatagtggcggtggaggggatcgaacccccgacctcacgggtatgaaccgtacgctctagccagctgagctacaccgccttatatagtttgtaaataatatggtggagactagcgggatcgaaccgctgacctcctgcgtgcaaagcaggcgctctcccagctgagctaagcccccataataattacagtatatcgggaagacaggattcgaacctgcgaccccttggtcccaaaccaagtgctctaccaagctgagctacttcccgtataattaacgcgcccgataggagtcgaacccataacctcttgatccgtagtcaaacgctctatccaattgagctacgggcgcatatgtttttattgaaaatggtgccgaggaccggaatcgaaccggtacggtgatcactcaccgcaggattttaagtcctgtgcgtctgccagttccgccaccccggcactataaaaatggagcagaagacgggattcgaacccgcgaccccaaccttggcaaggttgcattctaccgctgaactacttctgcatatgcgggtgaagggagtcgaacccccacgccgtaaggcgctagatcctaagtctagtgcgtctgccaattccgccacacccgcaaatggtgagccatagaggattcgaacctctgaccctctgattaaaagtcagatgctctaccaactgagctaatggctcttccatggtgccggccagaggacttgaacccccaacctactgattacaagtcagttgctctaccaattgagctaggccggcaatatgtaagaataaatggtggagaatgacgggttcgaaccgccgaccctctgcttgtaaggcagatgctctcccagctgagctaattctccgatttaaaactgcctggcaaagttctactctagcggaacgtaagttcgactaccatcgacgctaaggagcttaacttctgtgttcggcatgggaacaggtgtgacctccttgctatagtcaccagacatatgaatgtagattatacattcaaaactagatagtaagtaaaagtgattttgcttcgcaaaacatttattttgattaagtcttcgatcgattagtattcgtcagctccacatgtcaccatgcttccacctcgaacctattaacctcatcatctttgagggatcttataaccgaagttgggaaatctcatcttgaggggggcttcatgcttagatgctttcagcacttatcccgtccacacatagctacccagctatgccgttggcacgacaactggtacaccagaggtatgtccatcccggtcctctcgtactaaggacagctcctctcaaatttcctacgcccacgacggatagggaccgaactgtctcacgacgttctgaacccagctcgcgtaccgctttaatgggcgaacagcccaacccttgggaccgactacagccccaggatgcgatgagccgacatcgaggtgccaaacctccccgtcgatgtgaactcttgggggagataagcctgttatccccggggtagcttttatccgttgagcgatggcccttccatgcggaaccaccggatcactaagtccgtctttcgaccctgctcgacttgtaggtctcgcagtcaagctcccttatgcctttacactctatgaatgatttccaaccattctgagggaacctttgagcgcctccgttaccttttaggaggcgaccgccccagtcaaactgcccgcctgacactgtctcccaccacgataagtggtgcgggttagaaagccaacacagctagggtagtatcccaccagcgcctccacgtaagctagcgctcacgtttcaaaggctcctacctatcctgtacaagctgtgccgaatttcaatatcaggctacagtaaagctccacggggtctttccgtcctgtcgcgggtaacctgcatcttcacaggtactatgatttcaccgagtctctcgttgagacagtgcccaaatcgttacgcctttcgtgcgggtcggaacttacccgacaaggaatttcgctaccttaggaccgttatagttacggccgccgtttactggggcttcgattcgtagcttcgcagaagctaaccactcctcttaaccttccagcaccgggcaggcgtcagcccctatacatcaccttacggtttagcagagacctgtgtttttgataaacagtcgcttgggcctattcactgcggctcttctgggcgttaaccctaaagagcaccccttctcccgaagttacggggtcattttgccaagttccttaacgagagttcgctcgctcaccttagaattctcatcttgactacctgcgtcggtttgcggtacgggcacctattttctatctagaggcttttctcggcagtgtgaaatcaacgactcgaagacacaatgtcttctccccatcacagctcagccttaacgagtaccggatttgcctaatactcagccttactgcttagacgtgcaatccaatcgcaggcttcgcctatcctactgcgtccccccatcgattaaaacgattataggtggtacaggaatatcaacctgttatccatcgcctacgcctgtcggcctcagcttaggacccgactaacccagagcggacgagccttcctctggaaaccttagtcaatcggtggacgggattctcacccgtctttcgctactcacaccggcattctcacttctaagcgctccacatgtccttacgatcatgcttcaacgcccttagaacgctctcctaccattgtccaaaggacaatccacagcttcggtaatatgtttagccccggtacattttcggcgcagtgtcactcgggtagtgagctattacgcactctttaaatgatggctgcttctaagccaacatcctagttgtctgggcaacgccacatccttttccacttaacatatattttgggaccttagctggtggtctgggctgtttccctttcgaacacggaccttatcacccatgttctgactcccaagttaaattaattggcattcggagtttgtctgaattcggtaacccgagaggggcccctcgtccaaacagtgctctacctccaataatcatcacttgaggctagccctaaagctatttcggagagaaccagctatctccaggttcgattggaatttctccgctaccctcagttcatccgctcacttttcaacgtaagtcggttcggtcctccattcagtgttacctgaacttcaacctgaccaagggtagatcacctggtttcgggtctacgaccaaatactaaacgccctattcagactcgcattcattagggttccacatttactggttaacctgccatcaaatcgtaactcgccggttcattctacaaaaggcacgccatcacccattaacgggctctgactacttgtaagcacacggtttcaggttctatttcactccccttccggggtgcttttcacctttccctcacggtactggttcactatcggtcactagagagtatttagccttaggagatggtcctcccagattccgacggaatttcacgtgctccgtcgtactcaggatccactcaagagagacaacattttcgactacaggattattaccttctttgattcatctttccagatgattcgtctaatgtcgtcctttgtaactccgtatagagtgtcctacaaccccaacaagcaagcttgttggtttgggctcttcccgtttcgctcgccgctactaagggaatcgaattttctttctcttcctccgggtactaagatgtttcagttctccgggtgtgccttctgatatgctatgtattcacatatcgataacatgacataactcatgctgggtttccccattcggaaatctctggatcaaagcttacttacagctccccaaagcatatcgtcgttagtaacgtccttcatcggcttctagtgccaaggcatccaccgtgcgcccttaataacttaatctatgtttccaccatttttataagtcaaacgttaacatgaagttacgttcttttataaaaagatttaaacgcgttattaatcttgtgagtgttctttcgaacactagcgattatttcttatgaattcaagcttatttaaaactctttattcactcggttttgcttggtaaaatctatattttacttacttatctagttttcaatgtacaaataatggtgggcctaagtggactcgaaccaccgacctcacgcttatcaggcgtgcgctctaaccagctgagctataggcccattttttgaatgttaaataaacattcaaaactgaatacaatatgtcacgttattccgcatcttctgaagaagatgttccgaatatatccttagaaaggaggtgatccagccgcaccttccgatacggctaccttgttacgacttcaccccaatcatttgtcccaccttcgacggctagctcctaaaaggttactccaccggcttcgggtgttacaaactctcgtggtgtgacgggcggtgtgtacaagacccgggaacgtattcaccgtagcatgctgatctacgattactagcgattccagcttcatgtagtcgagttgcagactacaatccgaactgagaacaactttatgggatttgcttgacctcgcggtttcgctgccctttgtattgtccattgtagcacgtgtgtagcccaaatcataaggggcatgatgatttgacgtcatccccaccttcctccggtttgtcaccggcagtcaacttagagtgcccaacttaatgatggcaactaagcttaagggttgcgctcgttgcgggacttaacccaacatctcacgacacgagctgacgacaaccatgcaccacctgtcactttgtcccccgaaggggaaggctctatctctagagttgtcaaaggatgtcaagatttggtaaggttcttcgcgttgcttcgaattaaaccacatgctccaccgcttgtgcgggtccccgtcaattcctttgagtttcaaccttgcggtcgtactccccaggcggagtgcttaatgcgttagctgcagcactaaggggcggaaaccccctaacacttagcactcatcgtttacggcgtggactaccagggtatctaatcctgtttgatccccacgctttcgcacatcagcgtcagttacagaccagaaagtcgccttcgccactggtgttcctccatatctctgcgcatttcaccgctacacatggaattccactttcctcttctgcactcaagttttccagtttccaatgaccctccacggttgagccgtgggctttcacatcagacttaaaaaaccgcctacgcgcgctttacgcccaataattccggataacgcttgccacctacgtattaccgcggctgctggcacgtagttagccgtggctttctgattaggtaccgtcaagatgtgcacagttacttacacatatgttcttccctaataacagagttttacgatccgaagaccttcatcactcacgcggcgttgctccgtcaggctttcgcccattgcggaagattccctactgctgcctcccgtaggagtctggaccgtgtctcagttccagtgtggccgatcaccctctcaggtcggctatgcatcgttgccttggtaagccgttaccttaccaactagctaatgcagcgcggatccatctataagtgacagcaagaccgtctttcacttttgaaccatgcggttcaaaatattatccggtattagctccggtttcccgaagttatcccagtcttataggtaggttatccacgtgttactcacccgtccgccgctaacatcagagaagcaagcttctcgtccgttcgctcgacttgcatgtattaggcacgccgccagcgttcatcctgagccaggatcaaactctccataaaaattatgatgtttgattagctcataaatactaaataatgtttgtaacttatagttacgtttttggaattaacgttgacatattgtcattcagttttcaatgttcgtttgtcacttacaagatttaattataactcgtaagtttttgtaagtcaagaattatttttaattattttatttctaaaaaataaatttcctaactcaattaattcaacaaatattattttattatgtatttgttcgaatttcaatagtcaaatttacactttattaatattttgaatcaacaacttaaaacatttgttttttaaatattagtgccgtttgacgacttttatataatatcaagttattctagtagagtcaacataaaacaacacttatttttgtttaaaaattactgttgaagggattattttctattcgtaagtactatatgtatttaaagtgtaattccttacgctttttacttcagttttacaaacaaacttatcctcactttatggatagttatttagtaaaccttcgtttgaatatttttatgtttatttataaaggatactagttattagttactaccacttccgtagttagaatgttcttttcttctatttaaatatttttcagaataagcataaaaaagaagttaaacaactttcatgtcgtttaacttcttaaatattacgcttacttatatgaagtaagctaacgattttttaatttgtcatactaccaaagttaaattatttatcttggcattctttacaaactccataaatttccattcgatgatgtgttacgtcaaagtcagtcatatgctgagctaatctttcaatttcatttaactgtggatattgaaaatcaacgatcttaccacattgttcacatataatatgataatgattatgtgtattaaaatcgaatcgacttgatgagtctccatatgttaattcttttacaattccaatatctttaaacactcttaagttattatatattgtcgcaacacttatatttggaaaatcaggtgaaagtgcttgataaatttcatcagctgttggatgagtatgtgaagaaattaaataacgtaatattgcttgtctttgaggtgtaattcttacgcctgcttgtcgcaatgatgcaattgattcttctagttcatgttcaattgattctatttcaacactcatctatatcaccatctttcttatataataattattattacttactataaatataactgtagtattgcgcgcgtgtcaatatttacatgatgatttcatttaatagccttttttagcatcaacttcattctcaattagatcattcttattgagaaaattaactagattgtttttaaaaatatctaataagtcatactttgcttcataatcattaccagttatatgcgctgttatagttacattatccaattcatataattcatgattaggtttcaaaggttcattttcaaacacatctaaatatgcatgtcgaataactctactttttaatacttctattaagagcgcttctttaactatgctacctcgtcctatatttataaaaagagcttcatctttcattaattcaaaatgatttttctttagtaaatgaatcgtttcttgcgtttctggtaaagcatttataacaatgtcagcatttggtaatgtgctttcaagtgattcgatagtatatatctcatcaaactcatgtttgttctgacctgacttactcagaccaattaaattcatattaaaagcctttgctaacttcgcagttctagtagcaattgcacctgtacctaaaaataaaactgtttgtcctgaaaggcgtttaccagttattttcgaatcatatatatgttgtcgttggttatcatatgatagtttcatctttttataatcatctaaaatgaaagctaaaatgtattcagataattgtttagcttgaacaccttttccgttagttaaaagtatgccgtgatctgcaatataatctaacggtaatgtatttacacccgttgcaaaccatgcgatccattttaaatttggacaacgtcgtaaaaatgcctcattgataccgccatcataaccaactaatatatctaaatcagccaagtcactctcaggtatttctgatgcttttttataaaatttaaaatctacatctgaaaagcgttgttgtaattcagtttcaacttcacgcatacgattcaacccaacaactttcatatatgtcaccccaaaatgtttttaagttcttctatttgtgttttaactttaaccttctcgataacatctaatactttaccctgttcatctattataaaagtcgttcttacaatgcccatactttctttgccaaatgatttttttaactgatatacgccagtttctttagctaatttaaaatcttcatctactaataaatcgaaattcaatccatgtttctcaataaaattttggtgttttttctttgaatcaccgcttataccatatactgcaacatctaaatcattgaacatttttaaattgtctctaaagtcacaagcttctgtggtacaagtaggtgtattatctctaggataaaaatatataatcgcctttttaccttttaatgtatcatttgtaatgacagttccgtcctgattttctaatttaaatattggaaattgttctcctttttgcaacatataatcacctttttcttcattataataattttatgatacgatattagatgaaaatattaaattaaaagaggttgatataaatgaattttagtgaaagtgaacgtttacaacaactttcaaacgaatatattctaggcggtgtcaattccccttctcgttcttataaagctgtaggaggcggtgcacctgttgttatgaaagaaggacacggtgcatatttatatgatgtcgatggcaataaatttattgattatcttcaagcatacggtccaattattacggggcatgcacatcctcatattactaaagcaattcaagaacaagctgctaaaggtgttttatttggtgcgccgactgaactagaaattgaattcagcaaaaaattacgtgatgcaattccatctcttgagaaaattcgctttgtaaattctggaacagaagcagtcatgacaacaattcgtgttgcacgtgcatatactaaaagaaataaaattataaaatttgctggatcttatcatggccattctgatttagtattggttgcagcaggtagcggcccatctcagctcggttctccagattcagctggtgttccagaaagcgtcgcacgtgaagtcattactgttcctttcaatgatattaacgcatataaagaagcaattgaattttggggtgatgaaattgccgcagtattagtagaaccaattgttggtaactttggaatggtaatgcctcaacctggatttttagaagaggttaatgaaatttcacataacaacgggacactagtgatttatgatgaagtaattactgcattccgtttccattacggtgccgctcaagatttattaggtgttatccctgatttaactgcatttggtaaaatcgttggcggtggtttaccaattggaggctatggtggacgtcaagatattatggaacaagtagcacctctaggacctgcatatcaagctggtacaatggctggtaacccgttatctatgaaagcaggtattgcattactcgaagtactagaacaagacggtgtttatgaaaaattagacagcttaggccaacaactagaagaaggtttacttaaattaatcgaaaaacataatatcacagctacaattaatcgtatttacggatctttaacattgtactttacagatgaaaaagtcacacattatgatcaagttgaacattctgacggcgaagcgttcggtaaatttttcaaattaatgttaaatcaaggtatcaatttagcaccttctaagtttgaagcttggttcttaacaactgaacatacagaagaagatattaaacaaactttaaaagctgcagactatgcttttagtcaaatgaaataacttttaaggaagtatatttttaattgaattaaaataaaacaaatgctcacatagtagattcattttatatcgttaactattaacgtttaacttgatatgtcactatgtgagtttttattttacaaatttatactcttttaatctctgactaaagttttacatcgctatcagtagtatgtatgatttattttaacaactataaataagcttgaattttgtaactagtaagtgtataacagtaatgaatacgaatattagatattcaataaacttaaaaggggcgtcattatttttgagactaggagctcggatttttaaaactggtatagccattattttagctatgtctatcgcttctttactacctgatgatgttggtctgaaagccttagctggtgtcagtgctgttgttgcaatgcaacctagtatttatcgttcatttaaaacagtttctgatcaagcattaggtaacattataggtgccatactttctgttacaatggtaacaatttttagcgataattttatcattatgggtgttaccgtcatagtacttattgctattttatttaaatttaatttagcacatgttgctactttggcgagtgtaacagcattaatcattatgggacaacataccggttctttctatattaccgccttttacaggtttgtacttgtaatgattggtgtcataagttcatctctagttaactttgtgtttctaccacctaaatttgaaacaaaaatttactataattcattaaatatatcctcagatatttttatgtggtttaaattagtattaaatgatacgacggagtttaataatattaaacaagatagtcataatttaaaacaacgtgtcgaaaagttagagaaaatttatgattactatagcgaagaacgtcctattacaaaaaaacatattcaccaacagaatagaaagaaaatacttttcagagaagtagttcagacgactagacaagcttatgaagtattaaacaaattgtcgcgttatcaaaacgacttatatttacttaataacaatttcctattacaaatcaaattagatttagattcattaactgcttttcacgagcaaattttagctagcctttctaaaaaagcacgttataatgtgacacatgttgattatgagttagataatccgcagaaaaaagatttattgtctacatttcagcatgagttaataaatcatccttatcaaacggaatattcgtttgccaatgttatgcaaattgttgcagccatcgaagagtatcgacaccatttagagcatttagaccgcataagaattagctttttcacatatcatagatctgatgcagacattgaaattgttgaagaagactttgatttataacattaaaacaattcctgtaattaataccacaatgcgataaagtaatattgaatctcgaaattaaatttaaaaaagcagtaagattattttcaattaagaaaatctcttactgctttttctatgttatgaccccaccatcctgttacaacttttctcttcaagattgtactgaagtcaaacaactaatactttataagttttgaatgctatataaatgctcgtaagcaccttgttttgcaatcaattcacgatgcgtacctgtttcaacaatatgcccattttcaattacgacaattttgtcagcatgtgtaatagtggacaagcgatgcgctacgataagtgtcgttcgatctttactcaacacatctaatgcttcttgaataatggattcactttctaaatcaagtgcacttgttgcttcatccaggataagaattggcggattatttaaaaatattctagcaatcgataatctttgtttttgaccacctgataatttaacacctcgttcacctacttcagtatcatatccttgtgggaagttcataataaagtcatgtgcattagccattttcgccgcttcaactacttcttcatctgttgctgttggacgaccaagtaaaatattttccttaactgtatcagagaataaaatattatcctgttgcaccaatcctatttgatttcttaaacttcccgttaaaaaatctttaatgttgtgaccatctattaaaatttgcccagaagttacatcgtaaaatctcggtattaagttaattaatgttgatttaccaccaccactcatacctacgaaagcaactgtttctcctttttcaatactcaaattaatatcttttaaaattggagcttcgttatcgttatattgaaaactaacatgatcaatatcaatacgaccttgtttaatttcaataggttgagcaccaacaccatttttaatgtcataatcttcgtcaattaattggaatacacggtccattgaagcaaaactttgcgttaaagttgtaaatgatgcgactaaacgacgtaaaggcccgaacaataactccaagtatccaacaaatgctgcaagtgtacctactgtgattgatccagaaatagcaagatatgcaccaacaccgatgacaattattggcccaatatctgtaactgtattaattgcggcaaaggaataggcattccatcttgtatgtttcaacgcccgtgttaagaaattagtgttctttttatcaaagtttttcgcttcattgtcttcaatcgcaaaacttttaacgactgaaataccttgaacacgttcatgcaagaatccttgaacctcagctaatgcttgagatctttcacgcgtcaattttcttaatcttccaaagaaaacgtacaccgttaaaatgtaaaatgggaagataaacagtgctgctaaagtcaatttcacatctaaaaagaacattatggatagtgcaataataattgttatacaatctaaccaaatattcattaacccggttaaaatgaaatcttttgtttgttcaacatcattaatcactctagatattacttgccctacttgattattagcataaaatctcgcacttaaagcttgtaaatggttgtataactttttacgtatatcatacaatattttattacttgtccattgcgccaaatattgacgtataaattcaattggtggtctcactattacaaaaataaataatgcgataccaatggcaatagttaaatgatgaactttttcatcagtcgttagtgcgtggttattaatcacgccatctattgcatatttaattaaaagtggtataagcattggtataccaaacttaattatcccaacaataatcgttgcaaaaatacgatatttgtatggcttaacaaattgcaaatatcgtttaatcatacaatcccccctaatctattgccctatcctattcataagcataaaaatgaatagaggttggatacataatttgtagatgtaaattcttcttacaatttacatttttaaaattaagatatctcaacctctgtcatattcatgtgattaaatacgttgtcttattcgtatgttatattctattcaatttaatctatggatactgtgtccccacacgacagcaaaagttatcatacttctttatatcactaagtcaatataaatgatttaatcagtatttacactttatttgcttaatattgtctaatttttttgtaacgttctttccaaactttgataaaatctggcgcaaatgggcccttcttctgttctatccattgttgaagaatgtccacgttgcgtcttaaaataatatcaatatcatgcggataattcatttgattcatatgttgctcatattcatcttcatctaataaatgatactttccgtttggatatactttaatatctaaatcatagtctatatattttaatgcctcttcatcacatacaaatggtgatgacaaattgcaatagtaataaattccatcttctctaaacatgcagataacattaaaccaatattctgagtgaaagtaaacaattgccggttcacgtgttatccaagttcttccgtcactttcagttactaacgtatgatcattgccaccaatgacaacatgatcagtaccctttaatattgttgtttcagaccaaacgcgatgaatcttaccatcatgtttataactctgaattttaatgttttccccttctttaggtatggattctctgaccatactccacaccaccttctgttaatttaaccattataaattatagcatatttcagaaatagtattatataaatacatatttttacgaaataagattttactacttaatgattaaactcggtaatattgctaagtactacaacagagatttacatgtcccatttaaagtatataaaatcatcacttttatatatcaacactttaactttttgacattgttattctatgagatttaaagatatcatttatacatttttaaaattaatgtcactatatttttcgataatcttatcaatcatcgaatgttacccatttataaattgataaatctttgacataggtactgggaatgtatattgatctcgatcacttaaatcaaaccaaatcatgtcatctggtaatgtttcaatgttaattgttcctgaaacggcgtatacctttatcttccatgttaaatgagtaaattgatgcttcaactcaaaaataggtgtttctactggttgaatgtcatgaccgattttttcagtcatttcacgtctagcatgctcactttcaaacataggaaattgccacataccatgcaataatttttcgctacgcttttgcaacagatattgatcttgattatttctaattaaaaagacggattgctcaattacttttttacttacatttttagatttaacaggtaacttttcaaatgtacctttatcaaatgcctcacagttttcttgaactggacaaaataagcataatggatttttcggtgtacaaattaatgcccctaattccatcatagcttgattaaacgttccagattctgtagtaacatacggtaataattcttgttcgtacgatttcctcgtcgattgtaatttaatatctcgatagtcatcattcaatctagaccatactcgaaaaacatttccgtctacagttgctagtggtacattatatgcaatgctcattactgcagcttgtgtgtatgggccaacaccttttaacgctttaaattgatcaggatctttgggaactaagccttcatatttatcatgaacttctttaatagccgtatgaaaatttcgagctctactataatatcctaagccttcccagtactttaacacttcatcttccgaagcttgactcaaaacttccacagttggaaatcgttcaacaaaacgatgataatagtcaataactgttttaacttgtgtctgttgtaacatgacttcacttaaccaaatatagtacggattggtcgtttgtcgccatggcatttctctttgattttcatcaaaccagtgtatcaaattttctttaaaactagactgctgatacatttataaaaccctttcctcaccaaaattaattgtctttactcataatgtttttattgtacattaaaatcatggttagtatgtaagttaatttagttatttgcgaaattggattataatagtatatataatattatgaaatgagtgaactgatatggacactgcaacacatatcgcaattggggtgggccttacagcacttgcaactcaagatccagcaatggcttctacgtttggtgcaacagctacaacccttatcgttggttcattaattcctgatggggatactgttcttaaattaaaggacaatgcaacatatatttcgcatcatagaggtatcacgcattccatccctttcacaatactatggccaattttaattacatttttaatattcacgttctttagtggaaccaacccatttcatgtatggatgtgggctcagctcgcagtatttttacatgtctttgtagatatattcaattcttatggtacacaagcacttagacctatcacaaacaaatggattcaattaagtgtgattaacacatttgaccctattattttcacagttctttgtattggtattgtattatgggttataggcttgcatccatttgcagtcttctttcctataatcgctttactaatcatttattacatgattcgttttaaaatgagagccgtaattaagcaacaagctttaaaagcaattcaacaagagcatcaccccgttaaagtatttgttgcgccaacaataaaatttatggaatggcgtgtcgcgatacaaactgatgcacatgactatgttggaaaagcatatggtaggaatgtggtgtttagtgataaagtggaacgtcaaacattatcaacagactccattttatggaaagtcaaaggtaataaagatatacgtacttttttaaacttttcatcaatctatcgttggcaaacaacaacgttagcagatggttctactgaaattcgtttgattgatttgcgttatttaaaaaatgatcattattcatttgtggcaattgcacatgtaacaaacgataatgtcatagaccactcttatattggctgggtttttacagaagataagttacaacgtaaactgtatgctaaataatttcaagttattattcactaaagttaatctataaaaaatgaacaaccgggcagaataaaaatcaaaacgatttttactctgtccggttttttaatgtaaaactatgaatgcttttacaaaacctaaaatttatattgtcgctaacaaactacctttaatgactcgaaatatcaaaatcagtataggaaaacgatatctagattatattctaattgtttctgattctaacagattaatttacacaacaggtcagctaaacatcatgaagaagtatccgcctcgtctgtactatcatttgaaacatcttgttgattatcagtttgtgtcactttagatgttttattataaattgcgtgtgtcgtataccttgctaatacgaaatttactgcagctattaaacataagaataaaataaagtaaaaatgatatggaatgttttccatacttgatataccaaatatgatagattgtgctataccattaacaatgtaatacattggattcagcattaggatgtgattgataaatacatgattaggatttggtatgaaaataattggtaacaataagaaacacaatacacaaatcccataaaatatgatatttattttttcagttaatagtcgaataagaccaaaagtaactgatattaatcctacaaaaatagttgccatcacaataaaatagaatagcgctatatacgatgtttcgaagtttactggtttaaccaatgcactaatcatcgtcaaaatgactagcataataaaacttaaaatagacataataactactggcgtcgctgcggaaatattaaataacttagtaactaaaaagtcattcatataatgatgataagagatataaattgtgaacatcaataccgcaaaaacaatcaatgcaataattctaaataaccatcgcacctctttaacatcggtcaaatgactaaaggaaaatagcgtttcactggcaataataagtattaaacatgcagctaatacgattagaaaacttttccaactttgtttaaaacgttctgttacataccttttagtatgcggtaagtttttaaaatataaaataatattatctagcatctttacacctacaattcaatataaatccatttgtcttctttcaaattggcaatacaatatccattcccaactttagtaatccaaatgttattgttaatattaaacttatcttttaattcttttttatctacaattggataaacaaaaccgtataactgattattatcattgaaaagtaattgtatcggttgttgtgtaacggatgcaacgaaacggttatcatcatcaggaactaaagttttaataactgaactatgctttttatgtaattgactgttaaagtatgcatagtaattactataatttgatttcatatatggcgctaattttttaaaactatgcgtttgatataaacctgccgggttaaaatattctaatttatctttactaacatagtaagtcttattatcggcggtaacacgataatttttactattttcgccagtaattgtaactacactatattttggaattgtgacttgtttatccccttgcatatccacactgccattaaaagcaattccataagctaacttttcgccatatggatctttattttcattttgcatcgtagcacgattcgtaaaatctgttatcgaaataattcctatattattgaaaatgagcaacatcatcaatgctaagcctagaatagtacctgaggctaaagtccaaaaacgcactaaaaacttaggcggctttgcatgattatagcgctcaacacgtttgaaattataggtcatctctggtattcttgtacgattctttttccaatctaaatcaaagttttcaatttcttcttttgagtttagacttaatcgatcacgttcatgttctttaaaagatggaataacttgtttaagtgacccttccattcttaattgaccatgtgaaaaccaagctatatagttactcacttgtgaaattttatcaatatcatcaccaattgacacaatcgttaaattattttcaatataatcatttgttaattcaatcgcacgttctataaattgtggtgttaaatagtcaataacatgatttaaaataataatatttgattttgatgagcgtgcaatacttaatagtaattgagcgtatgccgctttcgaaatatggttaaccggcttcgttttataatcgcctaaatgtgcatattgaataatctgttcagctttatgatcattaatttcatatggaaatagttgaactaactgcgctgtgtaagcttcaacagtttgatgaattaacgattgaccttcaatatatccgtagaacaaatcttcagtacaaactactttacctttatcaggtttaattgcacctgccaacaattgacctaccaatgctttggaagattcaggttcaccaattatacctaatgcttctccttgataaatatgtaaactaatattgtttaaatcgatatcttcagcatcatatccaaaaggtaaataccatttcttattctgtttattcctatagtagtgtgttacttttagtaactttaaaacaattgaacttcccatctattttcatccttctataattgtaataacgctataggtaagccttcttcgggttcatcgctattaaatctaaacccccacgcaaaaataccttttaatctttctactttaaaatattgattactgccatcagtcagtttataaattttaccaatttctatcttttttctgtctactaagtaactttcggcaacaattactttactttgataaacgtcatattcatttaaaataccattcatctcagcttttctcattttctctttataaagttgtatttcgtgtcttaattctggctcagacatttcactcaatttcttctgttccatcggcaataccactttcttctaatttagctttaattttatcatatttatatccttttctcataaggccttcgatagtttttgaaattaatttctgttgcgtgtacttctttcgatttttattataaattttttctaaatctcgttgtaataaatcgtctaaaaccgcttcatcttgtgtaaaatccatttcattcaatacagcatgaatggtttccatttcaaaccctttttgaattaaagattgcattactttttctttaaccttattttgtggccctttttttgttttagatattttttcagcaatttggataatatcatcaagttcctgttgttctctataaagttctgtaaacatttcaatgatatttggttctataccaagttgatatagtttttgttgataaattttaggtcctttatctgtcgtgcgaatcattgtattttttaaactttccgcataatcttgatggtcgattaacttttcgcgataacaatattcaatcacttcagaaatcgcttgttctgatatctcttctttttgtaaatatagtataacttctttttcagttctctttttatatgataaatattggattgctttatttaaacctatgcgataatgatcatacttttgaatctctgccatatcagcagcttcaagttgttgccctttttttaaattaaatttgactaatgtatcgatatctatacccatttcaaattgttcatctaaaaaaagattaaaacgttctttgtttttcttttgaacttctattttagtaatcttcggcactggatcaccccgttactttctcaagttttaatacaatactcttttattattcaataagccacttcctatagcaaatgtttaactttaaatatttttcgatgctaacaaaaaatcacactatcatcttttaaaatgaaagtgtgattacaagcaaatctgtaaaatttattaagcagaaacaattcaactttatcattatgacatttcaattaaaccttctacattattgttccaagtatcttacacataaatgcaagtatttaacgatttaattgtgacatagcctgttgatattgtgcttcattgatataattttgttgcttcattttttctaagttcgtgcttacacgttgcgtaaaattctcagacatattattgatattatatacgctaggtgcattgactttactagctaaaatagcgctttgtaaaactgtaatgtgagacattgttgtactatttttattcacggttgttccaaagtaatggtttgctgcgccctcaagcgtatattgattatccccaaagtaaatattatttaaataaaagcttaaaatttcgttcttattatattgtttttcaactcgatgagctacaaataattcttttacttttctagtaaatgaacgatcattatcataaaaataatttttgacaacttgttgtgtaatggtactaccaccttgcacatctctgtcgctaatcgttgaaaataaggctctagttgtacctttcaaatcgaatccatgatgattgtagaatcgttcatcttccattgaaataaaggcacctttaacatactctggcatgttatcagctgacacaaaactacttttattttcaatttttcttagttcatccacattatcgcgtgtagataaaaaatacatgataccaataaacaatgcgataatgattagaatggttaataatattttcaatagtattcgtttactttttttctttttcggcggtttgccaactggttgataatacgtattatagtgaggttcgtgtttcatatgctcaaaatgttcatttgagtttgagtacctatcgcttcttttcatgcgtttgctccttcttttaaaactcacttagtatataacttgagtttaccagtactatcacaaataggctacactttttgggaaaatcagtccaagggcttacaatcgtatacgccatcatacttacttttttgttttttgaaaagattatagataaatcattgcgattttaaatattaatcatgtcaaatattgttatattttataaaaataaaagaccatccctattaaatgccaatagagacgaccttttatttgttattcattttttaaaactaaaatccatatttcatttcaaacgaaaatatataaattttaacaatcgataaccacaatactctattgtaattgcttaacgatttctcgattaaaatcatctaaatcgtctggtactcgacttgttacaatattgttgtctacaactactgactcatcaactacatgtgcgcctgcatttgataaatctttgcgtacgttcaatactgctgttaacgtacgaccttttaaatcgtctgtatctattagtatttgtggcccatgacaaatggcaaatgttggtacaccatttttagtaaagtatttagcaaatgtgccatatcgaccttctgtatctccacgtaaatgatctggtgaaaatcctccaggaattaataatgcatcataatcttctggtttagcttctgcaatacctacatcgacagtaactttttcaccgtgtttaccaacaacttcactatttgcagtatctccaatcactacagtattaaagccagcattctctaatgcctctttaggacttgaatattctatatcttcaaattcgtttgctagaataattgctacttttttagtcattgaaaatcacctttctatatatcattgatataaatactatagacaagtaaatcaatgattaaacatacaagatataaaaatattaagcgactgtcgcgatatctaactctaacacatcttatgtggtatttacttagatactaatttaaccttttcttcaagctgatctaacaatccaatccattcatctatatcttcaacacgtacttcatcaggatttacatgatcgatatcctcaataaacttatttaaacgcgcttttatctgttcgattgtttgctgttcattcataaaaagttaactccttttattttgttttctttttcattattatcctaacagaaattgcgttaaagcgatataatcttagctatatttatgacattcaaattattttgacttttaaaaatccccttttcaattaactaaaattaagagataatttgttacgagcgataatacgaagtggtatcataccgatatgaaccaaatagaaagaaggaagtttaagacgatgaatagcgtcaaatcgaagcaacctgttagcatttacaatgatccatgggaggcatataacgatgttaaagaacatggccaattaactttaagtaacatcgaatttacaactacaaatctttgtaatatgcgttgtagccactgtgcagttggttatactttacaaactgtcgaccccgaacctttagatatggacttaatttatcgtagacttgatgaaattccaaatctgcgaacgatgtcaattacaggtggcgaaccaatgttttctaaaaagtctattagaaatgttgttaaacctctattaaagtatgcacataatcgaggtatatatacacaaatgaattcaaacctaacattgcctcaagatcgttatttagatattgctgaatatatcgatgttatgcatatctcacataactggggaacaactgatgaattcgcaaatgttggctttggcgcaatgaagaagcaaccaccgttaaaagctaagttaaaattatatgaacaaatgatttcgaatgcacgtacattatcagaacaaggaatgtttgtatctgcggaaacaatgctcaatcaaagtacgctaccacatttacgaaaaatacatcaagaagtcgttcatgatatgaaatgtagcagacacgagattcaccctatgtatccagctgactttgcaagtcaattaaatgtgttaactctagcggaaatgaaaaagacaattcatgatatattggatttcagagatgaaaatatttggatgttatttggtactttgcctgtgtttccatgcttaaaagatgatgaagatcaaaagttactatcacgtttaagaactgctaaaaatgtaacgactagaaatgacccggatggccgtagtcgtttaaatgtcaatgtatttacaggtaatgtaatcgtaactgatttcggagatgaaacaggtacaatttcgaatatacaaaaagataaattaacagatgtatttgataaatggttatcctctgatcttgctaaatcattaaattgtcattgttctgagtttagttgtttaggaccaaatgttcttgttaaaaatatgtactatccgaatatggattttaaagataatgagcgtcatatgcacaaacaaccacaaattatacaattttaaaaacgcttaattatgcggagaagcactttatcgataagtagtctccgcatattttaatgctattacaaaataaaaaacaaataatcgctggcagtactctgcttaaataataaaggtcatttaataggactaatagtctataataaaagggttaaattttaactaaaagcataaacgtgcataatcaaaaagacagattgtaggtggaatattcgaacataacagttcaattcatccttaacaatctgtctttatatttttagtctctaatatgttgcacttgagctaaatattcaattgtttgtttactttcaatgcgacgtgcttttcttcgttcaacacgttgtggtgctgtatcataaaaccatttttcaacatcatcttctggatatacaccaggtacatgtttaggtttgccttcatcatctaacgcaacaaatgttaagtaacttaatgcagctaaatcatgcttgttattaaatacatcgtcaattctaatttgaacgaccacttccattgaactagtcccagcgtatgaaaccatcgctacgtattgtaatatgtcccctgttttaatcggctttaagaaatctactgagtctgtagatgcggtaactacttgcgcaccagcatgtttcatagctgtgattgctgcaatttcatcaatattagccatcaatgtaccaccaaacattgtatgatggtgattcgtatcttgagggaaaacttgtctatttttataacattttgattctgacatagatttcattggtctgtcctgatttgtcattattttatctcccaatctatactttaatcacgtatttgacctttaaatacatgtttcatttcctactcagcacctcaaaataacatttattaaaatgttgatgcccaatttccattttcaaatactagttcttttgaaccatcttcgaatatgccataaatagtcaaatcactactaccaatcatgaaatcgacatgtacgtttgaatcatttaatccgcttgcaatcttttcctcaacagtcatttccgttccaccttgaatattgaaggcgtaagcagatccaatcgctaaatgacatgctgcattttcatcaaataaagtattgtaaaaaatggtattacgatttgatatcggtgaatcatcaggtactaacgctacttcacctaatcttcttgaaccttcatcggtattgattaaatctttcaataccgcttcacctttttcagctgaaaaatcaataatttctccatctttaaacatcaatttaaattgatcgataattgtgccattataacttaaaggcaatttattagtaacatatccatctactctatttcgatctggtgctgtaaatacttcttcagttggtatattagcaataaaagcttgttccttgccgttaacataacttgtagcatcttcccagatatgattttccgctaaacctactgttaaatcagtaccttcagatacataatgcaacgcatgataatttttttgttgtaacttttgagcgtaaacacttaaattagcgatgtgttgacgccaattttcaactggatcgttaccatcaattcgcacaatatcgaatacctcgtcaataaacttaatatatgcttcttctacagatagttcaggatatactctcttcgcccaagctttagatggaaaagcagctacgacccatggaaattgatttttttgtacactttccatatatcctttaaatgcgcgtgcgttttgttgttgaaatgcttgtaatttttggctatcgataccatccattaaatcaggatcctcactaataagtgctaaattagcagcgccacgtttaacgtaatccattctcgcttcaacatcatatgattttatctcatgattagcaaaatgttccacggattcattttcaaattttaagcgttttaaggttggatcgctatatacaacacgtacatctgaagcgccacaatgatatgcttcttctacaattaaatgcgttaattctaatgtttctactgatgatctaataaatactggctgttttggttgaacattcataccaaccttaactaatagttcagcgtattgttgtaacttttctttgtaattagtcaaaattcccactcctagtcgtgtcgcaattgtcctaaagcgtcagcaatagctgtcacttcacttggcgataatctttctcttgattgaacaaaatcatatatatctgttaattcttcttcatttgcatttttatatttttcaggatctaataatccttgattaacaatatttaacttctctctaatagctaatactttctcttcatttgtcatagccacaatgttcacctctaataatagttatgttatcaaagtatcacaatttaataaactttaatagaattttatataatctgctttcttattgtttaaagtcgctataaaatggggatataactacatagtttggaggaatcaaaatggtagatgtagcatttgtctgtcttggcaatatatgtcgttctccaatggcagaagcaatcatgcgacaaagacttaaagacagaaatattcatgatataaaagtacattcaagaggtactggtagctggaatttaggagagccgcctcatgaaggtacacaaaaaattctcaacaaacacaatattccatttgatggcatgattagtgaattattcgaagccacagatgattttgattacattgtggctatggatcaaagtaacgttgataatattaaatctatcaatcctaatcttaagggacaattgttcaaactgttagaatttagtaatatggaagagagtgatgtaccagatccatactacacgaataattttgaaggtgtatacgacatggtattatcatcttgtgataatttaatagactacatcgtaaaagatgcaaatttgaaagaggggtagttttttatggaaaataaatttgttcctggtattttaattggtgccgtaattggtggcgcaattagtttagctgataaatctacacgtcaagctttagttcaatcagttaaagatgcaaaaaatggtaaccgcactcgtaagccttctaaagtcagcaagattaaagacgaagttttatactggaaagatgttgttgaagaaattcgtcgtaataatcctgaattagaacgttcattaaaggatgcgaaagaaacatttgttaatagaaaaaatcaacgctaagatgattttgtttttataaggcaatacttaacaatttggtgtacgcctttcatagttatcattattaaatgataatacaatgattggccaaactgcattgtttcagtattgcctttgttttaattttaaatcaaaatagcctatgaaagatttaaatcaattaatttctataatattatcatttttaaagcatatcattgtttagtttttttataattggataaatactaatagttactttataaaacattacatagagaaaggttaaggagtgcacatgtcgaaaaaggatcactcttcttcaaaataccttaattctgttaaggaagcgcaagaggagtcaaaaaagaaaaataaaagtaatcccaaaattgatgttgatcgtacatatattgaacctcaacaattccaatctaagaaacctaaaaaagaggatcaggttttcttcttatcaagattaaataaacctgcaaaatataagaaagactctaatttcttatcatatctcatctatcgcataggaaaagatgatgcctcaggattagcagcgcaaatgacttaccatttcgtacttgctatgttccctatgttgcttttcctattaacactattaccatttttcaatattaagcagagtcaaattactaatatgttaagtaatgcacccgctgaaacatctactctaattaagagtgtaattggtgatataactcaaaactccagtggtggcttattatctatcggtttgattttagcaatttggtcagcttcaaatggaatgactgcaattatgaattctttcaatgttgcttacgatgtagaagatagccgtaatggaatcgtattaaaactactaagtgttgtcttcactgtagttatgggcgttgtgtttgtagttgctctagcattaccaacgcttggttctgtaattagtcatttcctattcggtccacttggatttgacgaacaagtgaaatggatttttaatcttattagaattgtgttaccaatcattattatatttatcgtgtttatcgtgttatattcggttgcacctaacgttaaaacaaaacttaaatcggtattaccaggtgcagtatttacttcaattatttggttagctggttcatttggttttggttggtatatttcaaattttggtaactattctaaaacatatggcagtatcgcgggtatcatcattttgttactatggttatatatcacaagttttattataattgtcggtgctgaaatcaatgcaatcattcatcagcgtagtgtaattaaaggtaaaacacctgaagaagcagcattagaacatgatgacaataataaaaatcattataatgagaacactaggtacgaatatgctgaagatactaatgcaacacatcaacgtacgtatcatgttgatgaacatcctagtgatacctatccagaagatgataaaaatataaaagacaaaatcgttgataagcttaaaaaagactaaacatcaacaaaacagaggttttcgctaatgattgcgaagacctctgttttttggtgtctatttgatgttatattgtgattggcgtaagtaacttttcttaattcgatatgaactattgaattaaattatgttggaatgcatagataacagcttgtgttctatcttgcacttctaacttacttaaaatgttactcacatgtgtcttaaccgttttaatagtaatatgcgatgcactagcaatttcttgatttgagtaacctttcgcaatcaataataatatttccatttctcgttctgtaagcatttcatataactctgcgcgctttttcatacggttacgcattttcactaaaacttccggttcaaaaacagactctcctctagaagttttacgaactgcatcggcgatatcttttgcacttgttgtttttaaaatgtaactatcgacacctgcatctaatgcacgatatacctctttatcttcaataaaactagttaacattaatactttaatttgcggtaaatcttttttaatctgagtcgtcgcttctacaccatccatgtcttccataagtaaatccattaaaattaaatctggcttcaactcatgggctttggcaattgcttctttaccagaagcgccttcaccaactacttcaatatccctttgcgttgatagataacttgaaattcctatacgtaccatttcatgatcatccacaaacaatactttaatcgtcatacgaatcctccttatttaaaggtgctttcacctcgatacgtgtacctgaatctggcaatgatacaatatggaacgttgcaccaatttccaaagctctttcacgcatatttttaagtccataactttgttctaatttttcatcaacattaaaacctttaccattgtcttgaattctcaacaataaataatcgtctttattaaacaattctactgtcacttttgtaccgtttgaatgacgcaatgtattcgaaattgcttcctgtgtaattctgaacaaatgatcttcaatacctttaggcactttaaaatcttgtatttcatgcacaactttcattggcacttttttttgtaaatcaataactaaatctttaataccctcacctaaagatttgtcttttaaaccaagcggtcttaaatgtaacagcaaagcacgcatttctaactgcgaatcttgaaccattttctctaaaatcggaatttgttggtctaatggtggttctaacttcgtttctttgatagcagatagcatcatacttgccgcaaaaagttgctgactaacagaatcgtgaagttctcgtgctagtcgttgacgttcatcttcaataatctttttaactttcacatcattaatattataattttcattggttaagttttgagttttaagtcgcaacttatgcaattcttgatttaaaggtacgagtgtatggtataaatctaacgtttcactatatatttctatattttgatcattaataccaactgtttcgccttccattgaacgctcaatttgcgtcttaatccaatcattttgctgattgattttgtaagcgagtaccgaaccaacaataatacacaataatatgatgatgagatttaaaaataaaaagactggtattccgaatatttgtgtataaaacataccttgaaaatagatgatatttacaaaaactttatcgatgaacagaaatgcagctagcatgctatatactaagatgagcattgaaccaattgttctaatgtagtggttcatcgataaatcacctctacgtctccgataaacgttgatacgtagatattaactgtatagttatccggtttcatcatttcttcaatatgaatattgttattttcaactttatatgatttttcattcacataagtacttccataaaaagcagctacatgtaaattaatattgtaattaaccggcaatataacctgcactttacctaaaatgtgtctaacaacaatggtattattttccttaatatttgcagcttttgttaagtcaatatgtaggtcgccaattccatgttgaatttggacatcttcccacttatatacataaactggtgtgcgttgctcaccaaaccacttttgtttaataaaagatggtgaagtcataacctcatccgtcgcaactactttttttggtttaaatttgtgtattaaataacgcacaataagtagtaataaaaagacgaacaagatgatgattgtatacttattagacaataatgtgaatgcaattaatagcgcgcctatccaaaacgccaaaaggccacgtattttatgaaaataaagatatcctacataaactaatacacatcccaataatagaacgagtaaaaagccaattttttcaaaaaatatgtagtaaaaattggcaataatcattaatgcagtaaaaatgatcaacatttgcgttgatatatatttgtgtgtcatgtttcgccgcctttctatgccacagcgttcatataatttattagatacgatgttttttctgttgctattttttcagttgaagtttgttgaatttgagtttcaatttgtgcataatatgcttcaactttattcaactctgatttaatattttcaatttcttgattattgatttctcttgcacattgaatttgaaatgcttcagcaatatcaatatatttattttctaatgttagcattagactgtcaattaacttgctaagttgttcttttttagtaattaaataacgcatataatcatctaaatttttcattttttcatctaacattaaaaggtagtgcttgatattatttcttactgttgctctcaaaaactgttcaatataacgttcaacatagttcataactatcaccttttataataagttttaaaataccaaatgcgctatgtatcttcgttgatgtcgatgatatgtttgcttaaaaactactttattacaacatatttttgaaatgacgcattgattgtgttcttaattattataaaacagttccgaaaccaatatgaataggctccggaactaaatgatgttcatactttagtcttagtatatgttgaactattcttcttcaatctttgtcgttaaaatcggaccatccttagtcacgataaccgtatgctcaatttgagcgacaaaacttttatcactcgtttcaaaagcccattcatttttaccttctgtaacaaatgatgcatttgatgagataaacggttcaatagctaataccataccttcagttaataatgttttgtcttttggatcaaagtaattaagtacatgtgctggcgcttcatgtaatgataaaccaacaccatgacctgttaagtttttaatgactttcaaatcattttgtctagctgtattatgcaccgctttaccaatgttacttaacttagtacccggttttacttttgcaattgcattctcaaatgccatcgttgctacgtcacatactttttgtttcattggatcgtctgattctccaacgacaaatgaaatgcctgtatctgcataatagccattcttcaaagccgatacatcaatatttactaaatctccttcacgaatgacacgcttacttggaatcccatgtgccacctcttcattcacactaatacacgtttgaccaggaaaattttcatcatgaattggcgcagaaatagcaccgtattcttcaaataactctttcgcaatattatcaagctctttcgtagtgatacctggtttggttgcagcttgcattgtattgcgcactttagcgcatatgtatccaatttcttttaacgcttgtaattcttcttctgtttttacaatcattttatcccgttccttttttatataattataacttattatagcaaaaattctttgatatactaaagatgttactttagtattttggaaagcgagtgggacattgtgtgataaagaaaaaatatttctttatcgtccccaacctgcacattatcgtaagctgactttccgtcagcttctgtgttggggcccacaccccaacttgcattgcctgtagaatttcttttcgaaattctctgtgttggggccccggactagaattgaaaaatgcttgttacaagtgcattttatttcagtcaactactaacaatataacattgtggagcccagagctttgattaatgtatatgaaaatcaaagtaatgcttaagcatgattatttcaaatattttacatacatgaacttttccaatgtacgatactattattataaagcgctcgctaagattttacgatgattagaggttaaaaaatgaacgatcaatggtataaacatttaattggtgccagaacaattaaaactggtattgccatttttttaacagctgtcttttgtatggcacttgatttaacacccatctatgccattttaacggctgtagtcacaattgaaccaactgccaaggcatcacttattaaaggttaccgtagattacctgctacggtaattggtgcaggatttgcagtattatttacatatttattcggcgatcaatcaccttttacatatgcattgagtgcgacgttcacgattttattctgtacaaaactcaaattgcaagttggtacgaatgttgctgtactaacatcattagctatgattccaggtattcatgatgcctacatattcaactttttgtctcgaacattgacagcaattattggactcgtgacatcaggtttaattaacttcatggtgtttccacctaagtattatggtcaggtcgaagaaaaattaagtaagacagatgccttgatgtataaattattttacaatcgctgccaagaacttatcttatcaagactgcaatctgataaaagcgaaaaagcatataaaaatattttcaatttaaacaatcaagttgaaacgttaataagttatcaacgtgatgaattaagctatcataagaaaaaagaatgtgattggaaattactcaaccaattaactaaacgtgcatatacgaatcgtttgtttatcactcatttatcaaatatcatttacttgcctaaaaatactcgtgttaacttttcaggtgacgaaaaaatggcattgctaaaaattagtagtagcatcaaagatattttttatgatggttcttttaagagagaagatgattctgtagaaactttacgtacgacaataaaagcacttgaaattagtggtgaaaatcaaataaaaagtcatatactgtacgaagttctaatgatttatcgactgctagacagcagatatgcttaatttaagtaccttatgctaattggcaccatcacttataatcttactttataagtatttttatcgtatatagcatgtccctttttaaaattacaagcataaatattcagactcaaatatagccacacacctaaactacggagggatgtggctgtcttttttgattgtaattgtgtatcagatttaaatcattaatgtaacgaggctaattcattaataaatttattaaaatctgatttagtaacgtttatccttaatgaaataccagattctattgccatgtttgaatgccttaaaccagaatcaaaatcaatataaatacaaagcagttcttgattaaaatcaataatcgtaaaatgtaaatcaggttctataaaatatatttcagtaacaggattgtcgtattccatatgtttcaaattgtccatgtcactatcaaaaagtgcaaattcaaatttaatttcttgatcttcgaaagttgcactagtgtcgaaataataaattttattatcttcttcgataactacatcttttaaaataaatgttatcgatgttttactatgtacataagatgcatctcttaaaatcactttagtaggcttcatcgtcaaattcctttcatcattcattttttcatgttgcataatcaccattactattgataattctaggatagatactcattgtataataattattcactagaacaaaaaaacacacatcaatttggttgtttccatccaaaataatgtgtgtgtttatacatatatgattaattactatacttcatcgtttatcaattttaaatccattgatgcgatgttcagagttaacgagatttcttctgtctatttgctctgtctattaatacttgtttcgcttgcttttccgcttcattatctatttctttaggctcaaacggaatacccttacgttcacaagctttttctaacagataatcagtgatttcgtaatttttaggtaaaattggtccgtgtaaataagtacctaataaatttttataatgaatgccttcttttttatcttcatcattattaccataaccaaaagtaacatgaccaagtgtaccgaaattatgatatgttctaccaccgtgattttcaaaacctacaatagttccaaaagtatcactttcgataacaatatctcctgttaatcggtttgtctttgattcagtataaaaatctaaaatacctaacccttctaattctgtaccatcaggcgtgatatatttttttcctaaaaattgatagcctccacaaatcgttaatcccggcataccatcttcaatcgcttctttaagtggtgtcttaattttacttaattcttttgttgctaatgcttgttctctatcacttccaccaccgataaagaaaatatcacattcatcaaaggtaataccttctgtttcattgatttctacgacattaactttaatatttcgtttttttgcacgttgtcttaaagcaataatatttcctatatcactgtataaattcaatttatctgacataaaatgataaatagtcaattcatgcatattatgattgacctccttcaaacgaacggtttaattgttcaagcataggcgctaatgatgtatagtttggtattgcaactgtgaaacctttataatccatagtctttgccgttgctttataaatatcacgctcaactataattggtacttcaacctctgctaacttcaatcgcaattgaagttcttctgctcgtgtacctgtcacgatgatagcttcaatttgttgcttagataatttttcaaaatctgcatcataaatccatgaagtatctcgaccatctgcagcgttatcatttagcgaaataacatacactttttcgccctctaattgttcaccaactgataaacttgcattcattcctgcagggtttttagctaaattgatcatcgcttcttttcgttcttttttaaagtactgcatacgaccattgtctgatgtatacgtttcaaagccatttttaattgcttgttcatttaaccctagctctcttaaaactgtatatgctgctaacgcgttataagcgttaaagtcacctgcaattttcatattatatttttcatcattgatatttaaatgtaaaaacggtgccacatcaaaacttgatatttcatattttgcttgctctcgtttgaaaccacactgacagtgataatgaccaatttgattataatgaatataatcgtattgcaataagcgaccacagtttggacaatatctactttcattcatcgtactttgttcaaattcatgggcatgtgctttcataccatagtacacaatcgtatcacttgcgattttcaaacgactcacaaatggatcatcagcatttagcaataatttgatgcctttattactaattgtctctgcaatgttgttaaccataatatcaatttcaccgaagcgatccatttgatctctaaagaaattagtaaataccatcattgaaggtgtaacttcttttaacacacgtggaatcgaaccttcatcaatttcgattaccgcaattttagtcttaggtgttgattgcatgatgaatgcagaagttatacctgcagccatattagcaccttcattattgtgtataatttgaatattatttgcttttaaagtatgtccaattaagtttgaagtcgttgttttaccatttgttccactgataaatacaatatcatcaacttgctctgctaattttcttaatatatctgtatccacttttctagcgatttgtccaggtaaatctgttcctcttttacctactgctctacttgctttacgcgccaatttcgctagatggattgccgtccactgtctcatgtgtttcctcctcaaatttccactcgcatcattataacatgacaaggcaacttcaaaaaagtttctcaatcacaaattgatacagtgtttctaaattataatcattctcatttagataattaaaaatgatatttattctcaattaaatcttgctaaatgatacattttctcaattagagcgctgaaatcgggtattaaattataattattattatttacaattgagaatgagtttgttatactaaatttaattcatagtaattttaatttacaaataagaggtgtatcaaaatgttaagtaaaaatttattagaagcattaaatgatcaaatgaaccatgagtactttgcagcacacgcatatatggcaatggcagcatactgcgataaagaatcgtacgaaggatttgcaaacttcttcattcaacaagctaaagaagaacgtttccatggacaaaagatttataactatattaacgacagaggtgcacatgcagaattcagagcagtttcagcaccaaaaattgacttttcaagcatactagaaactttcaaagacagcttatctcaagaacaagaagtaacaagacgtttctataacttatctgaaatcgctcgtcaagataaagattatgcaactatctcattcttaaactggttcttagatgaacaagtcgaagaagaatcaatgtttgaaactcacatcaattatttaactcgtatcggcgatgacagcaatgcattatatctttacgaaaaagaacttggcgctcgtacattcgacgaagaataattaaacatcactacaatagacagataaatatcatacgacatgatagacatttgggtcacatacaataacccaatgtctatattattttgctttacggagatcactagattcattttctgaatcattgatctgcgttttttcattttcaaggctaattattgtatttttagtcatttattttttaaactactaatgttaataactctaaatttaatgttgaattaatttgaccgattttaaagcatatcatcatttactttttaatcagagttacatccaaatgatagatttcacgttataccttcacgtataatattatgtatcgtttgtaagcaaatgactaaaaagtctattaatatatacatttaattaattgaaaggattgactacatgatacaagatgcgtttgttgcacttgattttgaaacagcaaatggtaaacgtacaagtatttgttctgtcggaatggttaaagtcattgatagtcaaataacagaaacatttcatactcttgtgaatccgcaagactatttttcacaacaaaatattaaagttcatggcatacaaccagaagatgttgaaaatgcacctacgtttgactacgtatttccatatatgatgcaatttattgcagatttacctgttgtcgcacataacgcggcatttgatatgaacgtcttacatcaaagcattcaaaatattggtttaccaactccaaatttaacttacttttgtagttatcaacttgctaaaagaaccgttgattcgtatcgatacggtttaaaacatatgatggagttttatcaattagattttcatggtcatcatgatgcattgaatgatgccaaagcatgcgcaatgattacttttaggctactgaaaaattatgaaaatttaacatatgtaactaatatttatggtaaaaatctaaaagataaaggctaggactaaataaaatactcccttcaaagtaagcattgtaaaaatgtaaactttgcagggagctttattttatataaagtcatatatcgtcatatttttataagttgattgttctaaattacctacagtgacaccaataagtcgaattggtacatcagggtcttttaaatcgttataaagtaaatatgcaatattataaatatcttcttcagaactaaccgaatctcttaaactcatctgtttagataacgtttcaaattgataagttttaattttaaccgttacagttttagctgacttctgtaatttatttagacgttcagctgttttacctgacaactcccatacttttcttaaaatctcctcatcatcattcacgtctgttgcaaatgtgcgttctgtccctactgattttcttactcttgatgatttcacttcactatggtcaataccgcgtgccttgttatataaaccccgacctctttttccaaacaaacgtattaattcaaattccgttttctcatataaatctctaccgttaaaaataccattatcatgcattacttttttggaagctttacctacgcctggaaaatctccaatatccaatgtcatcaaaatatcatggacattttgataatcaatcacagtcataccatcaggtttattcataccactcgctaatttagctaaaaatttgttataagaaacacctgcagatgctgttaaatgtgtctgctctagaatatcttttctaatatactgagcaattttcgaagcaggaaggtctggtctcactaattctgtaatatctaaatacgcttcatccaatgacatcggttctaccttatctgtataacttcggaaaatagacataatctgcgcagatgtttctcggtaagcaccaaaattacttgtgacaaagtatccatttggacataatttatgcgcttgtgacataggcattgctgaatggacgccgtattttcgtgcttcataagatgccgtagagacaacacccctactacttgctttaccaccaacaatgactggtttccctttcaatttggggttatctctcatttcgacttgtgcaaaaaaataatccatatctatatgaataattcgtctctcagtcaagtgctcacctccctactaatttttacttttataacgcacaaaaatatctcaacataattatacgctgtgtacgatttttttacataaatcttgcacttagcgataactatattgagataactacaagttgttataaaatcaattgctatttaagcatgatgatgaagacgattgagtaagaaaacataggtaatctgaaataattcaagcaaattcattttgttggtatcatcatattaaaatttattattgagtcggcttttgatgatacaaataaatactatcttcatcttgttgaacatatttaaaactactagatattgttaatgcaacaagcaaaatatctataaagcaataagcggtatgcatactaaacataaaaataagtgatgaataaccaaataccttaattaaaataagcaagccagtacttaataggattagtggtgacagcataataattgagaattgccatttgttgaagcaagcatctgctgtttggaataagattctgtctttttttatattaaacataggtttgctatcttttttaaataaaagaaataatgctctatggataagttcatgtaaaatcaataaaataatgaatccagcaaacccatatacaagattgatgatgatattttgatcgacaaccgctgtgacacctaacgcccacttatacgtaaataaaatcacgaataacgcaataacaagttgcaagataataaaccttcgcatttgaaaattatttgtcgttaaatcaattttatgcattgccaaccctcctgatcatgacattcttattcttctttaaatatagtatacaatgtcacatttaatttaaaaagttcatatcaagaaagtaaattggctgtaataaaattttaatatacgacttctttcttcacttattaaggcggaattttatctcaaatcatgtgcgctatttcaaattgaataatgccactgtctcaacatgtgttgtttgtggaaacatatctaccggtgttacctcttcaagttgatatttttcagctaataataatgcatcacgttgctgtgttgcgggattacatgaaatatagacaatacgcttaggttctaatgtaagcaaagtctgaataaacgtttcgtcacagccctttcttggcggatcaaccattacaacatctggtttaatcccttgtgctttccattgtaaaataacttcttcagctttcccacagacaaaagttgtattattgcattggtttatagtcgcattttgttgtgcgtcttcaattgcagaaggtactacttcaacaccgtatacatgttttgcatgtggtgccatatatagccctattgttccaataccacaataggtatctaatacaacttcattacctgtcaattgcgcatactcaattgctttattatataatttctctgtttgttcagaattaatttggtagaatgactgatcacttattttaaatgtactatctgttaattgatcaataattgtatctttaccatatagcgttatagactgacgtcccataataacattagagtggctatcattaatgttttgtttaatgcttgtcacattaggaaatgcatctaatatcttctcaacaacagcattttttttgtggccacttttttaccattagttacaaaaataatcatcatttcgtctgtatgatatcctgttcttacaaccaaatgtctcattaaaccttttttcaattgttcttgataaatacttacatttaaatcttttaaaatagatttaacttcattcatcacttcttgatgttgtgaatcttgtattaaacaactttccatgtcaataatgtcatggcttctttgacgataaaagcccataataacttcattctgttcattcttaccaactggaatctgggacttgtttcgatatctccaaggatctgtcatgccaactgtatcgttaatcttagaattatcaaaatgagcttttcgctgaaacaaattaatcacttgttcctttttcatttcaagttgtgcttcgtatgataagtgttgaagttggcacccaccacaacgttcataatatatacatggcggtgcaacacgattctcacttctcgtatttatattaagcaacttacctatcgcaaagttcttttttactttgataattttatattcaatttgttcattaattaaagcttgtggtacgaaaataggaaagcgatctatttttacgacaccatggccttcatgcgttaaatcaacaactgttcccgttttaatgtcatttttagctattgcttgcaaaattttacctccaaaatgaacaggttaggaacaaaattatacgcttcctaacctgccattatatatttcactacttctgtttattcttcgattaaattgtcatcaacatgatcattatttattaactcttcatttacaatatcattaggtgcaaagacatctatatgacgttctagattcaagaaattcgctggtaatttaccaccatattctccatctacatttagttgtaagtctgtgaatgatgaaatattaattgcctttgctttttcataaataactttaggatgcttagtatgttctcctcttgaagctaaagtcataatatgaccaagttctgcaaggtttgatttttcaactataattaacgtaaaatagccgtcatctaacttagcgtccggcactaatttttcaaatcctgccattgaattagttaaacctaaaaagaataataatgcttctccttggaaaacattaccatcatattcaattcttaaatctacagctttcatttgaggtaacatttcgaaacctttgatgtaataagcaaatggaccaacaatagatttcaatttactcggtgtttcataagaaacttgcgtcaattgtccgcctgcagctaaattaataaagtatcgattattcattttaccaatatctactttagtagaatgaccttcaatgatgacatcaagtgcccccatgatgtcattaggtatatgcaatgcacgtccaaagtcattaacagtacccataggaatgacacctagcttaggacgattaggcttttctgcgataccattaactacttcatttaatgttccgtcaccacctgcagcgattaatacatcataattttcatgcatagctctttctgcttcaagtgtggcatcacctattttctcggttgcatatgcactcgtttcatatcccgctttttctaattttattaaggcatcaggtaattctcttttaaattgctctttacctgatgtcgggttataaatgattctagcacgtttcctcatatcttatccctctacttaaaattcatatattttaacttcatcttggtttcgtctaatagggagtgggacagaaataatatttaacaaaatttatttcgctctaccccaacttacattgtctgtagaatttccttttgaaattctctatgtttggggccccaccccaacttacattatctgtagaatttcctttcgaaattctctatgtttggggccccaccccaacttacattgtctgtagaatttcctttcgaaattctctttgttgagggccccaccccaacttgcacattattgtatgctgacagaaagtcagcttctatgttggggcccctgactagaattgaaaaaagcttgttacaagcgtattttctttcagtcaactactgccaatataacattgtagtgcctaggacattgaatttatgacccaggctcagtcttatttcatcattcttaatatcgttaaagaccaacttgtatcttaaacaaatactatctcaatatgtacaaaggttgttatttattcagcatttttgccgttcttcgttatatagacttcgtcaattatgctattttacctttaaaatgatgttgtaaatataatgttgtctttatacaaaaatgttttatacctttttattatacagtttgccttaatataattaaagctaacgcattaataaaattaatatttttaccattaacatgtacaatgaataaagttaaaagtaatatgacttctatagatataaataaaccctcgattgcatctaagtcagcaatcaagggtttaatttttaaatcttcatcgtttgatgattaaaattatcttttatctaattcttgttttaaaagttgatttactaattgtggattagcttgacctttagacgctttcataatttgaccaactaagaagcccatagctttgcctttaccatttttgtaatcttcaactgattgttcgttattgtctaatgcttcatttacaaattttagaagtgttgcttcatcagaaatttgaactaagccattatcttccataatctgtttagcattaccacctttagctgctaactctgggaagactttcttcgcaattttactgctcattgttccgtcttcgataagtttaatcatacctgctaaattttctggtgttaatttagtatctaataattctacttgatttttatttaaatattcgtttacgccacccattaaccagttagatgttaatttaacatctgcaccgtgttcaattgttgattcaaagaaatctgacatttctttagtcaatgttaatacgtgtgcatcgtatgcaggtaaacctaattcatttacatacttagctttacgctcatctggtaattcaggaattgtctgacgaacacgctctttccaagcatcatcaatatataaaggtacaatgtcaggctctgggaagtaacggtaatcatcagaaccttctttaacacgcattaaaattgttttacctgtagattcatcaaatcgacgtgtttcttgtccgatttctccaccatttaacaattcttcttcttggcgtttttcttcatattctaaacctttacgtacatagttaaatgagtttaagtttttcaattcggctttagtaccaaatttttcttgaccatatggacgcaaagagatgttagcatcacaacgtaaagatccttcttccatcttaacgtctgatacaccagtgtattgaataattgaacgtaatttttctaaatatgcatatgcttctttaggtgaacgaatatctggttcagatacgatttcaattagcggtgtaccttgacggttcaagtcaactaatgaatactcacctttatgtgttgacttaccagcatcttcttccatgtgaagacgagtaataccgattcgttttgtttcaccgtcgacttcgatatcgatatatccattttcaccaattggttgatcaaattgagaaatttgatatgcctttggattatctggatagaaatagttcttacggtcaaacttagattctgttgcgatttccatatttagtgccattgcagcacgcattgcccagtctactgcacgcttattaacaactggtaagacacctggatatgctaagtcgataacatttgtatttgagttaggttctgctccaaaatgcgctggtgatggagaaaacatttttgagtccgtttttaactctacgtgaacttcaagtcctataactgtttcaaaatgcatgatttccactccttataatttttcataaacgtcatgtaaattgtattgtgtttcatattgataagcgacacgatataacgttttttcatcgaatggtttaccaatgaactgtaaaccgattggtcggccatttgattgtccacaaggaacagaaataccaggtaatccagctaagtttactggtgttgttaataaatcattggcatacattgttaatggatcatcaatttcttcacctaaattaaacgcagttgtaggcgctgttggaccaactactacatcataattttcgaatactttatcaaagtcatttttaatcaatgttctaactttttgagattttttatagtaagcatcgtagtaacctgaacttaatgcaaatgtacctaagaaaatacgacgttttacttctttaccgaaaccttcagatcttgacattttatataattcttctaatgaatgagcttctttagaatgataaccataacgaataccgtcaaaacgagaaaggtttgacgaagcttctgatgatgcaatcacgtaatatgatggaataccaaatttagtatttggcaatgatacttcctcaacgacagcacctaaagattttaaagtttctacagcgttttgaactgcttcttttacgtcatcagctacaccttcacctaagtattctttaggtaatgcaacttttaatcctttaatatctttaccaatttcagatgtaaagtctacatcatcaacaggtgcacttgtagagtcattaacatctgcaccagaaatagcttctaatacgattgcattatcttttacatttcgagtcaatggaccaatttggtctaatgaagatgcaaaagcaactaatccaaatcgagatacacgaccgtatgttggtttcataccgacaacgccacaatatgcagccggttgtctaattgaaccacctgtgtctgaacctaagctaaatggtactaagccagctgcaactgctgctgcagatccacctgatgaaccacctggtactgctttatggtcaaatgggttaactgtttttttgaaataagatgtttctgttgaaccacccattgcaaactcatccatatttaatttaccaattaaaacggcattctcattatgtagtttttccattacagtagattcgtaaattggcacaaatccttctaacattttacttgcacatgttgtttctaatccgtttgtaataatgttatcttttatacccattggaataccaaataatttgccatccatttggtcttttgcttgtaattcatccaattcttgcgcttttttaattgcattttctttatccagcgctagaaaagacttaattgttggatcagtctcttcaattgcatcatatatatctttaacaacatcagatggtttgatttttttgtcttttattaaagttaataaattctcaaccgattcgtagcgaatgctcatcttacgcgtcctcctcattcatgattgtaggcactttaaattgtccatcttctgtttctttggcatttttcaaagctaattcttgcggaatacctttaattgctttatcttcacgtaaaacgttttgtaaatctaaaacgtgatatgtaggttcaacgccttctgtatcagcgctatcattttgttttgcaaaatctaaaatgctttctaatgtgttggccatttcttccgtttcttcaggagaaatttgaagtcttgcaagattcgcgatatgctcaacttcttcacgtgttacttttgtcattaataaaagcctcctttaagtcattcatcactaaattgtatcaaatttccaattaaaaatctaagtatttatgaggtgctactttaatttcatataaactgtataaacattatcattcgtttaccaaattatttttttgaaaacaacaccctttaatattagacaacccaattcaatattatgattatgcaattttaattataaaaatttgcccatatccaaaatatacgaaagcgctttctatattggtataaaagtatttcaaaaagaataaatttaattttcctacttttctaaacatttatctttatgtataatgttttcaagtaactaaattataaattaaataaagggagtgtttatcatgcttacaatggggacagcattaagtcaacaagtagatgccaattggcaaacttatattatgattgccgtctactttttgatactaatcgttattggcttttacggttacaagcaagcaactggtaacctaagcgagtacatgttaggtggacgtagtattggaccgtatattactgcattatcagctggagcttcagatatgagtggatggatgattatgggtctacctggttctgtctatagcactggtctatcagctatgtggattacaatcggtttaacattaggtgcttatataaattactttgttgttgctcctagacttcgtgtttataccgaattagctggagatgcaattacattaccagatttctttaaaaatcgtttaaacgataaaaataatgtgttaaagattatttctggattgattatcgtagtattctttacattatatacacattctggtttcgtatctggtggtaaattatttgaaagtgcttttggattagattatcatttcggtttaatattagttgctttcattgtcattttctatactttctttggtggatatttagctgtatcaattacagatttcttccaaggtgtcattatgttaattgcgatggttatggtccctattgttgctatgatgaatttaaacggctggggaacgtttcatgatgtagcagctatgaaacctacaaatttaaatttatttaaagggttatcatttataggaattatctctctattttcatggggattaggttatttcggtcaacctcatatcattgtaaggtttatgtctattaaatcacacaaaatgctacctaaagctagacgtttaggtattagctggatggcagttggtttattaggcgctgtggctgttggtttaacaggtattgcattcgtacctgcttatcatattaaactagaagatcctgagacattattcatcgtgatgagtcaagtactgttccatcctcttgtaggtggtttcttacttgctgcgattctagctgcaattatgagcacgatttcttcacaattacttgtaacatctagttcattaacggaagacttttataaattaattcgtggtgaagaaaaagctaaaacgcaccaaaaagaatttgttatgattggaagattatctgtattagttgtagcaattgttgccatcgcgattgcatggaatccaaacgacacaattctaaacttagtaggtaatgcttgggccggatttggtgcatcattcagtccacttatgctatttgcactttactggaaaggtttgacacgtgccggtgctgtaagtggaatggtttcaggtgccttagtcgttatcgtttggattgcgtggattaaaccattggcacatatcaacgaaatattcggcttatatgaaattattcctggatttattgtaagtgtaatcgttacatatgttgtaagtaaacttactaaaaaacctggtgcatttgttgaaactgacttaaacaaagtccgcgacatcgttagagaaaaataattcataagtcttaacaaattaaaaaggtactaatgttaatcaaaattttgactaacattggtacctttttattatctttaatttacaattaattactgtaaatatgaacttgtggttctttgtcatcttttgtcttactaattaaagcacgtggttggttaccatctttaatacgaatttcatagttatcgattttatcgaaatatttattcgcttgttcagtaacgtactgtgtaataccaattgtttcagcttgtccatagtaatcgattggtaaatctactactaatcgttgtggctttttatcaacaaatttaactttccctactgcttgtgtgaaattagaaaaatatgattgcaaattatcgttaaattgcttgaaattattatttaaattttcatcataatctgctgctgttgaagaaggtaataaagctgatttttcattgatattatgccattcattaagctttgtttgactcttttctgcagtcgcttgagtgataaattcacctggtgtgattgaatcttcacttgattgcttataaattgcaaaatgaattggtatatcttttaaatcatcattttcacgtaaccttgataatatctcactagccatttgtttaccttgctttttaacttcgctatcatctatttttttactaaaagtcggtccatctttttcttttttatagtaataaacactattcatagctaaaccaatcgtcatacctttaatattcttaccttttgtatctccaccaccataaaaatcttgctctaaaatgttagataaataggctggtgatttctctgcaatcttttcaggatctgtttcaccttcatgtgatggattaagtcctaaattttcattcgctttcttgtcttttttatctttttcagacattttatcgatttcacgttttgtatacttaggatttaaataggcattaattgttttcttgtccaaaaattgaccatcttgatacaaatatttgtctgttggaaacacttctttacttaagttcaataaaccatcttcaaagtcgccgccattataactatttgccatattatcttgtaaaagtcctcttgcctggctttctttaaatggtaacaatgtacgatagttatcaccttgtacatttttatccgtagcaatttcttttacttgatttgaactattgttatgtttttgattatcttttccagcctggtcatccttatggttaccacaagcagcgagtataaagatagctgtaatcaataatactaatgtacgcttcatcgacatacccctctaactatttaattcattttgcttatctacaaattgttgctctgtccaaatttcaatacctaaactttgtgcttttgttaattttgaacctgcatcttcaccagcaataacgacatctgtatttttagtaacgctacttgtaactttagcaccttgtgatgcaagccatttagatgcttcattgcgtgtcatttgatgtagcttaccagttagtactatcgttttaccactaaattcaggatgtccttcaatatctgatgttttgatacctttataaatcatattaacatgtttatcttttaatttttgaattaaagcacgaatatcttcattttctaagtaagtaactacagattgtgctactttatcacctatatcatgaatttctactaattccgcttcagttaccgttagtaatcgatctatcgtttcatatttttctgctaacacttggctcgctttaacacctaaatgcctaatacctagaccaaataataaattttccaaagagttgtccttagcttgttgaatggcagctaataaattatcaacttttttctgccccattctatctaaaggtaataaatcttcttctgttaaatagaaaatatcagcaacatctttaattaattcgctttgataaagctgttgaataattttagttcctaaaccatcaatattcatggcttgtcttgatacaaagtgaatcaatccttcaacaagttgtgcttggcattttggattaatgcaacgaagtgctacttcgccttcaatacgtactaattcatgtccacaacttggacaatgtgttggcatatgatatgtgacagcatcttcaggtctacgttctggaatactacgtacaacttcaggtatgatgtcacctgcttttttcactacaacactatcaccaattcgaatatctctgtcatgaattaaatcttcattgtgcaaagatgctcttgatacagttgtaccagctacttttactggttctaaaatagcagtaggtgtgactacacctgtacgtccaatacttaattcaatatctaataatttagttactacttcctcagctggaaatttataagcaatggcccatctaggagatttttgtgtgaatcccatctcatcctgttgatctaaatcattaaccttaataacaatcccatcaatatcataaggtaatgactctctttggcttgtccatttttcaatatactctaaaacaccatcgatattatttacacgcgctctatttttattcgttgtaaaacctaatttatctaactcatctaatgcttcactttgcgaacgcgcattgaaatcagtgaaatcattgacactatatataaatacgcttagctttcgttttgccgttaatttagaatctaactgtcttaatgatcccgcagcagcgtttcttggatttgcaaataactgctcatcatttttttctttttcttcatttaatcgtaaaaaagaacgtctcggcatatatgcttcaccacgaacttctacatttaatggttctttcattttcaaaggtatcgcatgaattgtttttaaattttcggtaatatcttcacctgttgttccatcaccacgtgttaaaccttgaacgaagtatccatcaacatatttcaatgatactgctaagccatcaatttttaattcgcacatatattcaacgttgccaatttgttcacgtatgcgttggtcgaattttctcaaatcatcctcattaaatgcattccctaaacttaacattggcgtgtcatggttgactttattgaaagaggcttgggcttcaccgccaactctaactgttggagaatctacagtcttatactcaggatactcctcttctattttaatcagttcattaagtaatttgtcatattcactatctggtacagatggattatcctctacatagtattcataactgtattgatttaataaatcatgtaactcgttcacacgagacgataaatcagccatcccttaatcctcctttttttcaattggtgcaaattgcgctaacaaacgttttggcccttgtgatttaaagataatatctagttcgattgagccgtttttctcgtttacattactcaccatgccttctccccaggctttatgcatcactttgtcacctacattccaatcagatgaagatacttgttttttcgttgacgttgttcgttgactaaatccacgtttagcaaaaggttttgccttaggttgtatcatttgtcgtttgccacttgaatgattttctaatagtgattctggaatttcctttaaaaacctagatggcatatttgactgaggacgaccaaataacattcttgatgtagcatgagtaatatataacacctcttcagcccttgtgattgctacataacaaatacgacgttcttcttgcatttcatgatcatcttcactcttaatcgctctaatatgtgggaataaagattcttccatccccattataaagacgattggaaattcaaggcccttagccgagtgcatcgtcattagtgttacgccattttcagtatctgcctcatcaatatcagctactaacgataaatccgttaaaaagttaattaatgactgttcttctaatggggtattttcctcatagtcttttggtactgacataaattcatcgatgttttctaatctacttcgagattctagtgtattttcacgttcaagcatttctcggtagccagacttttgtaatacttcatcaactatttcatgaatttctaaaaattcttgttcttttatcaagctttggatcaactcgtaaaaattaagacactcttgtgtcaccttttttgacaatccgataaaatcagcttctccaagtgcatcaaacatactgatattgttttgaagtgcataattttgaactttttcaacagatgaaggacctacacctctttttggaacattaataatacgttgcaaactaatgtcatcattactattggcaattatacgcaaataacttaataaatctttgatttctttacggtcatagaacttttggccaccaaccattgtgtatggcatattagatttcatgaatgtttcctcaagtacacgtgattgtgcatttgttctatataaaattgccatatcttgatatttcttaccattacgttgatgcttcataatttctcgtattacaaattccgcttcatcacgttctgtcattgcttcatagtaatgaattttttcaccattcgtatttgcagtccacagtccttttggcttacgttcagaattatttttaatcacttcgttagccgcatttaaaatcgttttcgtcgaacgataattttgctctaaaaagattgtattcgcttctgggtagtctttttcaaatgataagatattttgaatatcagcaccacgccaaccataaattgactgatctgagtcacctacaacacataagtttttaaacttacttgctaataatttaactaatgtatattgtgctttattagtatcttgatactcatctacatgaatatattggaatttgttctgataatattctagaacttctggtacacgctcaaataagttaatcgttgtcataataaggtcatcaaaatctaacgcttcattacgtgacaattggcgttgatatccactataaaccgttgctaccatttgcgagtgataatctgtggcttctttttgagcatctgcaggtgttttaagttcatttttcaaattactgatcgcaccgataaacattcgtggttcaaactttttactatcaatattttcattttttaagacgtctttaataacagatttttggtctgtaggatcaattatcgtaaaattgcgttctatacctattcgatctgcatcacgacgtaaaatacgaacacacattgagtggaatgttgacatccaaataacttctgcttgatcacctactaatttttgaacacgttctttcatttctcttgcagctttatttgtaaaagtaatagccaaaacattgtatggtgagacatctttttcgtctaataaataagcaattctatgtgttaaaacacgtgtcttccctgaaccagcacctgccataattaacaatggtccttctgttgtctttacagcttcactttgctctgtattcatatgatttaataacgcattcatttactagactcctttatttttactgtttttaaagcttttttaatatctttataaataatatcaccgacgataattgtatctgcaatagctgccatctctgtcgcttgttgttctgaggaaataccgccaccataaaaaagttgcgtttctgttagatgttctgagacagcttgaacctttgatacgtcgccataaatgccactatactctatatacataaccggtaatcgatacatatgattgaccatttgggcatatgcttctaaatcttctgttgttaaatctgtatttgctttggtatgttttgccactttgctatcagcattgcacacgacatacccttcaaatattacttcttcaaaatctatactatgtccatatgttttaagcgcttctaataatgtaccattgtgaaatgcaacatctgtactgttcagtactgtaggtacaaaataaaaatcaaaaccaggcattacactttcgatgtttgatatttcaagtactaaaggcaatgggtatcttcttaccctgctcattaaatgaatgacattatcttcagtaacgtcatcagttccaccaatcataattgcatctgtttgagacatacaaatcgcatctaaatcatcatctgaaatatgtttagctgggtctaatttaaaaatatggcgccattttttaatgtcatacattttccgaaactccttttttaacatacatatgattatagcatttttaagtgtcgagttctaaagacttaatatgaaatttaagttcttttactctgtaaattttttcgtgaaaaaacaatgattatctaccttattagtgcagatagataaccattgtttatcgttcatttattattcatttgtttcaatattcatacgatctaaaatcattgtataagcatcattaccccattgtaatgaacgcttcactctagaaatcgttgcagtcgatgctccagattcttgttcaatcgttgcataggtataaccttgcttaatcattttagcaacttgtaatctttgagacagtgattgaatttcatttacagtacacaaatcatcgaaaaattggtaacattcttctctattttctaacgttagtattgcatcaaacaattcatctaacgctgcacctcgtaatttttcaatttgcatatcgaaacaacccctataattttattctttatgtcattttaacgcattaacctattaaagtgtagcgatttatattttattaaatctgaatcgttactttatttaattttatgctaatccagcgcgttcgaaaatagtgtcaacttgattcaaatgatgtttaggatcgaaacattcatccaattcttcttttgttaaaacacttgtaatagactcatcttgttcgattaattcacggaaaggtgttttcgtttcccaagatgtcatcgcttttggttgtactttgtcgtatgcttcttcacgaaccatacctttattaattaatgctaataagacacgttgtgagaaaatcagaccaaatgttttatctatgttaatacgcatattatcttcaaatacagttaaacggtccacaatattcgtgaaacgattcaatgcataatctagtgctattgtaacatctggtaacataatacgctcagctgaagaatgagaaatatctctttcatgccataatggcacattctcataagctgtagtaatataaccacgaattactcttgaaatacctgtgatattttcagaaccaattggatttcgtttatgaggcattgcagatgaacctttttgaccttttgcaaatgcttcttcaacttctcttgtttcggttttttgaaggttacgaatttcaaccgcaaatttttctagtgacgtcgcgattaatgctaatgtcgcaatatagtatgcatgtcgatcgcgttgcaatgtttgagttgatacaggcgctgtgccaatacctaaatgtttacacacataactttctatttcaggaggaatgttagcaaaagtacctactgcaccactcatttttcctacttcaatttcttctcttacttgtttgaaacgttgtaagttacgttgcatttccgtgtaccacaatgccattttgacaccaaatgtagttggttctgcatgcactccatgtgtacgtcccatcatcaatgtatatttataattttttgctttttcagctaaaacgtcgataaatctttctaaatctttttcaataatgtcatttgcttgtttaataacgaaacttaaagctgtatctacaacatcagtagaagttaaaccataatgtacccacttacgttcttcacctagcgtttcagaaacttgtctagtaaaggctacaacatcatggcgcgtttcttgttcaatttcttgtgcacgttcgacatttacctttgcgttttgacgaattttttgtacgtcagctttcggtatatgtcctaattcactccatgcctcacatgctaaaatttccacttctaaccatgcttcatagcgattttgatcagtccaaatattagacatttcttctctagaataacgttcaatcatttttttaactcctatcgtatgtatactcgaattttcaaaaacagaacatttttaacaaaaataaataaaaagttcgtttttaactctactcttcacagtttaacagaattggttataaatgtataaaaaatttccgtatattctcattctattttattttttacattaatacaattatctatggcagattaatactgatttctaattgtaaatgttcgcaacactttaatctaattggtatttataatgatccattaagaatatattattgcattttagtttttctcccctcaagtacactatccaactttttattacaattaggacaatcaaaagctttagtaatatcagataatattcactttacttctcctattgtatggaattttcaacaatctactttacctagtttcataatatttcttcttacatttcataatatgttttaaaattattcacttctaatataacaaattttctactcacaaaaagaatatatgttctattgcataggtatggcattttaaatataagccattaatatcgaactccagaatcgtataaatacgaaactgattgtagaaaaatacgcagagattttcataatagtaaatttttatagaaagacataaattgactacgcttctttcgaaatcgactaatacattttcatgaaactttcgatcatattaattattgaatgagatgtttgcaatatagtaaataagatactaaattattacataaactgataatgtgtaataattaaatattttttaaacatagattaaaaatttatattgaaattcttaactaaatttaatataattattttataataaaagaaaggagtttttatatgaaaagaaactttccaaaattaatagctttaagtttaatattttctttaagtattacccctattgcaaacggtgagagcaattcaaatatcaaagcaaaagataagaagcatgtgcaagttaatgtcgaggacaagagtgttcctactgacgtacgtaatttagcgcaaaaagactatctttcttatgttacttcacttgataaaatctataataaagagaaagcctcgtatacacttggtgaaccttttaaaatttataaattcaacaaaaagagtgatggtaattattattttcctgttttgaacactgaaggtaatatcgattatatagttacaatttcaccaaaagtcactaagtattctagttcatctcctaaatacacaatcaatgtttccccatttttatctaaagccttaaatcaatataaagatcaacaaattactattttgacaaactcaaaaggttactatgtggttactcaaaatcataaagctaaactcgtactaaaaacaccacgtctagaagataaaaagttaaaaaagaccgagagtatacctactggcaataatgtaacgcaactaaagcaaaaagcttctgtcactatgccaactagtcaatttaaaagtaataattatacttacaacgagcaatatgtaaataaacttgagaatttcaggataagagaaactcaaggtaacaatggttggtgtgcaggctatacgatgtctgcattactaaatgcgacttataatactaacaaatatcatgcagaagctgtgatgagatttttacacccaaacttacaaggacaacgattccaatttactggtttaacgccaagagagatgatttattttggacaaactcagggaagaagtccacaacttcttaatagaatgactacatataatgaagttgacaatcttactaaaaataataaaggaattgctgttttaggtagtagagtagaatcaagaaatggtatgcacgcagggcatgccatggcagttgttgggaacgctaaattagataatggacaagaagttataattatatggaatccatgggataatggttttatgactcaagatgctaaaaacaatgttattccagtatccaatggcgaccattatcgatggtattcatctatttatggttattaaaatttgtattttagaaaggtaaataatattatggaacaatttgaattatttagtattgataaattcaaatgtaattctgaggctaagtattatcttaatattattgagggagaatggcatcctcaagatttaaatgatagccctttaaaatttattctcagtacctcagacgattctgattacatttgcaaatatataaatacagaacacaaacaactcacattatataataaaaataatagctcaattgttattgaaatatttataccaaatgataataaaatactactaacaattatgaacacagaagctttgggaacttctcctagaatgactttcattaagcataagtcataagactatctagatatgattaagtaaactattaatcttattaaaggtctctaggaagtaaaaatttcatgcgatgagattgttttagaaaaagcgacgatatatataatttaacaatgattttaaaatattaagaacccccagcatatgctttatatagcttgctgggggtttttaatacaatatggattgagcatcttgcatgtataaacacttaggctattcaaagtaaaattactcaaactttgaatagcctttcctcttcaaatagtctttattaaattggattatgttattggattttcttacctacaaaaatgatttcttgatgtgatacttcaaccgtgccatctttttgctcttgaaacacgggtttttcaatacgttttaccggcatatacccttgcattttcattcgtgacaagcaatcagcaattgtttcattctcatttactttgaatttcatgttctactacactttccagttcttctggttcataatctttaagctttctacgacgaatgcctttagtccagaatccaccatgtatgtttcgaggttcatacgcaatgataaatgctttcggatctaaattttttatcgtatccatcaatttacgttcatattttcttggtgttaaaatttgcatcaccatacgactaccatctctaccaaacgcagcatagtgcgtaacgccatatcctaaatttcgaagttcattcggtaaatctaactcatattctgctgaagttacatttacaactgtataacctaatgccagtttttcttctattttcataccaacaatgatacctattgaaaaaccaaatgcgtaggcaataatattttgaatatggtctaaattagacataaccaaacctaaaccaacgatataaactaatacttctaaaaaactaactgatgcagcaatataacgataacctttcaacgttaaaattgttcgcatcgttaaaaacgttacataacaaacgttaatgataaatatagttagtaccattaaccatggattttctgttacgaatgacataaggcgccccactctctttcaattacactttaaataccaaactgcttcaaactaaccttaatgaatgcatattaatataatatagtacgaaaactctcataaataaatagcgaatttgtcataaataaaaatttattcttaaatgaacatacttacattagttcatacactatcaatttatatactgaagtagcctagctgaatgtggtttaacgttattaattctaactcatatttaatttaagtcacacgtttagaagaaaaaattaaattaggattttggccacgtgtatcttgtatatgcaagttcacgtttgtgtgcatttcgtatataatgattttcaattactttttgttcttctggcgtaactggcttaccttctaaataattatcaatcgcctcataagttacacctaatgcatcttcatctggaagttgtggtttatcatcttctaaatcagcagttggcgttttttcatataattcctttggcgcaccaagatacgctaataattgacgaccttgtcgtttattcaaaccaaatataggtgcgatatctgcagcaccatcaccatacttcgtataaaaaccagttatattttcagctgaatgatctgttcctactacaataccttgtcggtttgaagcaattgaaaattgtactttcatacgttcacgcgctttttcatttcctttttggaaatctgtaagaacaataccggcttcttttaatgattgcacactttgatcaactgcaggtttaatatttacagtaactatttcgtctggttcaatgaatcgcaaagcttgctcaacttcatcagcatctttttgaactccataaggtaatttaactgcaataaacgtacaatcaatgccttcttcacgtaattcgttaacagacatttgtactaattttccaactaatgtagaatcttgtcctcctgaaatacctaacactaaagattttataaatgaatgtgattgtacataattttttataaattgctttaattccataatttcttcagcactatcgatacgctttttcactttcatttcttgtacaataacgtcttgtaatttactcattatcttcttccatctccttaacgtgttccgcaacttcaaaaatacgtttatgtttattatcccaacatgtcttgcttaaatcgactggatattcttgtggattaaggaaacgcttattttcatcccaaatagattgtaatccttgtgctaaatattcacgtgattcatcttctgttggcatttgatatactaatttaccattttcataaatattatgatgcaaatcaatggcttcgaaagattttataaatttcattttataagtatgcactggatggaataattttaaaggttgttcatcgtatggattttcattttccaaagtaatataatcgccttctgctttacctgttttcttgtttataatgcgatatacatttttcttacctggcgtcgtaaccttttcagcgttatttgataatttaatacgatcactatatgaaccatcttcattttcaatagctacaagtttatatactgcacctaatgctggttgatcgtatcctgtaatcagctttgtaccaacgccccaagaatctacttttgcaccttgtgctttcaaactcgtaatcgtttcttcatccaaatcattagacgcgataattttagtttcagtaaaccccgcttcatcaagcatacgtcttgcctctttagataaataggcgatatctccagaatccaatcgaatacctacaaagttaattttgtcacctaattcttttgcaacttttattgcatttggcacgccagattttaaagtatggaatgtatctactaggaacacacaatttttatgtctttcagcatattttttgaaggcaacatattcgtctccataagtttggacaaatgcgtgtgcatgtgtaccagacacaggtataccaaataatttacctgccctaacattacttgtagaatcaaagcccccgatgtaagcagctctagcgccccacaatgctgcatcaatttcttgcgcacgacgtgtaccaaactccattaatttatcatttgatgcaatttgacgaattctactagcctttgttgtaattagtgtatggaaatttacaatgtttaataaaattgtttctattaattgcgcttgaatcaatggtgcttctacgcgtaacaatggttcgttaccaaagcataattcgccttcttgcatcgaacggatgctgcctgtgaattttaaatcttttaaatatgacaagaaatcatccttgtagccaatagactttaaatattccaaatcagattctgaaaatccaaaatgttctataaaatcaatgacgcgttttaaaccattaaaaacagcatagccactattaaatggcatttttctaaaatacaaatcaaatatagccattttttcatgaatattatcattccaataactttcagccatatttatttgatataagtcattatgtaacattaaactgtcgtcttctaattggtacacttgtatctctccaatcgacctaaatattttcttacattttatcataattcatttttttatatacataagagccccttaatttccatacttttaattaaaatcaaccaacaatttaatgacatatacataatttttaagagtattttaataatgtagactataatataaagcgaggtgttgttaatgttatttaaagaggctcaagctttcatagaaaacatgtataaagagtgtcattatgaaacgcaaattatcaataaacgtttacatgacattgaactagaaataaaagaaactgggacatatacacatacagaagaagaacttatttatggtgctaaaatggcttggcgtaattcaaatcgttgcattggtcgtttattttgggattcgttaaatgtcattgatgcaagagatgttactgacgaagcatcgttcttatcatcaattacttatcatattacacaggctacaaatgaaggtaaattaaagccgtatattactatatatgctccaaagaatggacctaaaattttcaacaatcaattaattcgctatgctggctatgacaattgtggtgatcctgctgaaaaagaagttacacgcttagcaaatcacttaggttggaaaggaaaaggtactaattttgacgtgttaccactgatttaccaattacctaatgagtcagttaaattttacgaatatcctacttcattaattaaagaagtacctattgaacataatcattatccaaaattaagaaaattgaacttaaaatggtatgcagtccctatcatttccaatatggacttaaaaatcggtggcattgtatatccaactgcaccctttaacggttggtatatggtaactgaaattggcgtacgtaactttattgatgattaccgttacaatttactagaaaaagttgcagatgcgtttgaatttgatacacttaaaaataattcatttaataaagatcgagcacttgttgaattgaactatgctgtgtatcattcctttaaaaaagaaggcgtatcaattgtcgatcatttgaccgctgcaaagcaattcgaactattcgaacgtaatgaagcacaacaaggtcgtcaagttaccggaaaatggtcttggctagcaccgccattatctccaacattgacgtcaaattatcatcacggatatgacaatacagtaaaagatccaaactttttctataaaaagaaagaatcaaatgctaaccagtgccctttccatcattaagttagtagaggtgtagcatatgcaattatattatttaggccctaaaggtacattttcatatttggcttgtcgtcagtatttttctgaaaatgaagcaacttttcaaccaaagtcaaatttatttgaagtcatcaaggcagttgcagatgatgacacatcgattggtgttgtccctattgaaaattctatagaaggaacaatcaacattgtggcagatgcacttgcacagcaagatgtctttgcacacggtgaaatacgtttagatattaactttgcattatatggtaatggaacagattccatttctgatattaaaaaagtgtattctattgcaccagcgataagtcaaacaacaaattacatacatcaacatcaatttgcctatgattatgtcgacagtacaattcaaagtttgactaaaattgaaaatggcgttgcagcaattgcacctttaggtagtggcgaagcttatggttttacacctattgatacacatattgaagactatccacataacgtgacacgttttttagttataaaaaatcagcagcaatttgatcaaaatgcgatatcattgatgtttttaattacaccaatgcatgataaacctggattgttagcaagtgtgcttaatacatttgctttgtttaatattaatttatcctggattgagtctcgtcctttaaaaacacaattaggtatgtatcgatttttcgttcaggctgattctgcaattacaaccgatataaagaaagtcattgctattttagaaaccttagatttcaaagtagaaatgattggtgcttttaattaaactttattttctaggttctacaatttaaataaaataaagagtcaaccaaggattaaaataggaatccatccttggttgactttcttttgtttgtattgtttttacacgatgcttcggtatacatttcgttaccactcgttcaagcaattgctaatgtaactttttatttttcgttctaatctgcaattactatttcaatggcagtggttgatttatatcaatacctaaaactataggcattacataatacacgactaaaataataattattgcactgattaagtttacccagaatcctactgatgccatttgtttgatagatattttacctgaaccaaagataattgcattcggtggtgtccctactggtaacatgtatgcacagttagccgccatagctgctggtgccataagtagtaatggatgcactccaacagcaacagacaacgttgctaaaatcggtaaaatcatcgttgcagttgcggtattagatgtcacttcagttaaaaataagacgaagatcgttatgacgattacaataagaatcggactaacaccatttaatgatttcaactgttcgcctaaccattttgctaaaccactttctgatatacctttagctaatgctaaaccgccaccaaataaaattaatacaccccacgggagctcttttgcaacttcccagtcaatgatacgacgatgtttttcagtatttttagctggaataataaataataatattgatataaaaatagcaatcgtaccatctgcaacggatgacgtaacttcccattttttcagaagaaactctcttgtaatccataataagctggcaagtacaaagatagtttgtactaccttttcttcatacttcattttgccaagctcgtctaacttttgtttaattaacgtctgaccaccaggtaaatatttcaaatcatgtctaaacgcaacatatcttaaatagagccaagtaatacctaacaaaacaatgaccgttggaatccctacaatcatccatttagcaaaactaatttcatgtccaaaatgttgcatgtattgtccttttaaaataattagcggcggcgttccgataagtgtacctaatccgccaatcgtacctgcatagccaattgctaaaactagagatttttcaaacttttgaatacttgtttgattcgtattggcttcttgtaaatcatgtgcttccttaataattgctaaaccaatcggaatcatgatcattacagctgcagtgttcgatacaaacatagataagaatcctgttgccaccatgaatccaagtaatatttttgaagtgcttgcaccaattaaattaataatagtcaaagctactctcgtatgtaaattccatctttccattgcaattgccaaaataaatccacctaaaaacaaaaagataatatcattgccatattcggatgatacttgttctggtgtaagtatgtgacctaatggtaataacacaattggtaataagcttgttgctgcaataggaattgcttcagtaatccaccaagtcgcaatccataaagtaattgctaaaacatagacgcctttccaaggtaagtcttgtggatgaaagaataataatgttaataggaaaagtaatggacctaatattagtccaataagttgtcccgcactaaacggtttctttttctttgattttgaaaagaatgttaaataccttttcgatatcattgattgatgttgattgaaataagccataaatttccccctcatgatgattatgacaagctacttcaactcactatattagagtatagaaagttgtctatcttgtattatcattaccgtcaaaataccccttttatcagataattgggtttattatagcatatttataccgttttatgaatgcgctttcaaaagattatttactatcttaattctaatgtcatgcgaaactttttacttttttaattcatctacattgactgtagtaacttgaatacccgcttcaacaggacttaaaaacactgtatcaatatcttccaaatgaattgattgagtcgaattattgaatgtattcccaacgattaatacatctttatgtttaacattattataattacgtacatgtatcgcatctttagacattgatcctttaaattcatttccaattatattcatatttattcctgcttgggaacctaagtcttttcctgtcatcacatctgcagcatttttaccatctctaactcctaaatatctaataccaccctcacagttaataaacttattattaataatgaaagcatctttatacttcaagggagttaatgcataaccttgtatatcttcaaatatattatttctaatatgaatattctcatagtaacgattatgtctacttgcatgtgagccaatagcacgattccaacttcccatttcgggcaattctgaaggtccaaaataacaatcttcgataatgacatttttcgttatcgtgccatctgtcgttccgaattttggaaaagcaccaggtacttgaatgtctaattgtattgcttcagaataaaagcgttcgccactatagtctacgaatccttcaaatgaacagtttttaatatagagtccattaatcccacaagcatcaattgcatgaccactcactacattcttaatggttacacctattaattgaatatcttcagcatgcccaatgcacatagctgtattgttataaggatacgatacgccattcatatcaaacttgccgcctttgatatgaatatgactgtgtccattataaccacgataaaaaccaaagcgatgaccattttttaataaaggacccgaatgacatcggcgtaaaatagtttcattatctaacaaaagtgttgtattgccatatatcgttaatggtttgcaaatatcatacgtcccttttggtatataaactgtcgttggtttacatcttccatgatttaacgcacgttgtattgctcgagtatctttagttttgtttatacctgttaacccataatctttcatattgatatacataaatcgtcatcctttgtccattttctaattactcatatattaaccaattattcaaattataatcgtgttaggttgatttagcagatagtcataaatctcgtgatgccatctattagcatttttatattcaaaacatcatcacttgatattagttctaagtttgtcacatttagtattctattacagctattttaaaactaccgtaaaaacatcttataatatttgttgattgcgtgatttgctcttccaaaaaagttgattaatctatatacttaatctatatttatatattaaccattagggttaaaaattactctagcatttatgaatagatgggagtttattttattattatataggagagatgttgaatgacacatcgcgcactattagttgttgactattcatatgactttatcgcagacgacggcttactaacatgcggtaaacctggacaaaatattgaagattttattgtttctcgtatcaatgactttaattattatcaagaccatatattctttttaatggatttacattatttacatgacattcatcatcctgaaagtaaattattcccaccacacaatatcgtagatacaagtggtagagaattatacggtaaagtaggtaaattatacgaaacaattaaagcgcaacctaatgtacatttcattgataaaacgcgctatgattcgttctttggtaccccgcttgatagtttattgagagaaagaagtattaatcaagtcgaaatcgttggtgtatgtaccgatatttgcgtgttacatacagcaatttctgcatacaacttaggttataaaatttcagtacctgctgagggagtggcttcatttaatcaaaaagggcatgaatgggcacttgcacatttcaaaaactcattaggtgcagaggtagaacaacacgtttaaatcgtgctaaaataattataaagaatacaatatacaagggagatatttgacaatggctaaaacatatattttcggacataagaatccagacactgatgcaatttcatctgcgattattatggcagaatttgaacaacttagaggtaattcaggagccaaagcataccgtttaggtgatgtgagtgcagaaactcaattcgcgttagataaatttaatgtacctgctccggaattattaacggatgatttagatggtcaagatgttatcttagttgatcataacgaattccaacaaagttctgatacgattgcctctgctacaattaagcatgtaattgatcatcacagaattgcaaatttcgaaactgctggtcctttatgttatcgtgctgaaccagttggttgtacagctacaattttatacaaaatgtttagagaacgtggctttgaaattaaacctgaaattgctggtttaatgttatcagcaattatttcagatagcttacttttcaaatcaccaacatgtacacaacaagatgttaaagcagctgaagaattaaaagatattgctaaagttgatattcaaaagtacggcttagatatgttaaaagcaggcgcttcaactactgataaatcagttgaattcttattaaacatggatgctaaatcatttactatgggtgactatgtgactcgtattgcacaagttaatgctgttgaccttgacgaagtgttaaatcgtaaagaagatttagaaaaagaaatgttagctgtaagtgcacaagaaaaatatgacttatttgtacttgttgttactgacatcattaatagtgattctaaaattttagttgtaggtgctgaaaaagataaagttggcgaagcattcaatgttcaattagaagatgacatggccttcttatctggtgttgtttctcgaaaaaaacaaatcgtacctcaaatcactgaagcattaacaaaataatactatattactgtctaattatagacatgttgtatttaactaacagttcatcaaagtagaatttatttcactttcaatgaactgttttttatttacgtttgactaatttacaaccttttcaatagcagttttcattcctttagctatcctaaccctcagattaatgatttctatacaattccccttttgtctttacattttcttaaaatatttgcgatgttgagtataaatttttgttttcttcctacctttttcgttatgattaaagttataaatattattatgtacacgattcatcgctctattttcaactttcaacatatataattcgaaagaccatttaaaattaacggccacaacattcaaatcaattaatcactttttccaaaataatcatataaggaggttcttttcattatgaatatcattgagcaaaaattttatgacagtaaagcttttttcaacacacaacaaactaaagatattagttttagaaaagagcaattaaagaagttaagcaaagctattaaatcatacgagagcgatattttagaagcactatatacagatttaggaaaaaataaagtcgaagcttatgctactgaaattggcataactttgaaaagtatcaaaaatgcccgtaaggaacttaaaaactggactaaaacaaaaaatgtagacacacctttatatttatttccaacaaaaagctatatcaaaaaagaaccttatggaacagttttgatcattgcaccatttaactatccttttcaactagtgttcgaacctttaattggtgctattgcagcaggtaatacagcaattattaaaccatctgagttgacaccaaatgttgcacgagtgattaaacgattaatcaatgaaacatttgatgcaaattacattgaagttattgagggaggaattgaagaaacgcaaacgttaattcacttaccttttgactatgtcttctttacaggaagtgaaaatgtaggcaaaatcgtttatcaagctgccagcgaaaatttagttcctgtgacattagaaatgggcggtaaatctccagtcatcgttgatgaaacagcgaatattaaagttgccagtgaacgcatttgttttgggaaattcactaatgccggccaaacatgtgttgcaccagattacattttagtacacgaatctgtaaaagatgatttaatcacagccctatcaaaaacgttgcgtgaattttatggtcaaaatatacaacaaagtccagattatggccgcattgtaaaccttaaacattatcatcgtctgacgtcattacttaacagtgcacaaatgaatattgtatttggtggtcatagtgatgaggatgaacgttatatagaaccaacattgttagatcacgttacaagtgattcagcaattatgcaagaagaaatttttggtcctatcttaccgattttaacgtatcagtcattggatgaagcaatagcctttattcaccaaagaccaaaacctttgagtttatatttatttagcgaagatgaaaatgctacacaacgtgtaataaacgagttatcatttggcggcggcgctattaatgatacattgatgcacctagcgaatcctaaattaccatttggtggtgttggcgcctcaggtatgggacgctatcatggtaaatattcattcgacacttttacacatgaaaaaagctacattttcaaatctacacgattagaatcaggtgtccatttaccaccatacaaaggtaaatttaaatacatcaaagctttctttaaaaattaatttttgagacaaaaataaaccatgcttccataatttgatgttcttgaaaacaataaatttcaaggtatacacaaattttttggaaacatggttttctttttatcatgattaattaaagattaaaatatgacacatacaccttcagatgctacacgagtgttatcacatagcgtaattttacctgtttctttatttctttcgaaaacagttacaactgaatctccttgctcatgagcacaaactaaaaggtcatctgatgaggcaatattaaaatctcttgggaattgaccaccactttcagtaattgttactagttctaagtgttgaccattatcaagaactttaaaaattgcaatgctatcatgccctctattagatacatataagaattgttggtcatgagataaacgcactgctgcaagtttagtatctccatcaaagttttcaggaattgttaaatgacgctcgagctcttcaaatttaccgtcattatattctgcaacactcacagtattggataattcgtgtacgacataagcaaattttccattatcatgaaattcaatatgtcttgtcccgtcactatctttaaataaagattttttataaaattcaaacccgttgtcatcaaatttataagtaacgatacgatcagcacctaaatctgttactgcaacgtacttaccatctggagtttgattaatataatgtgcgtgtggatgatcttgtctttcatgtgtacctgttggaaaatcatgcgcaagttcttgaattagacgtataatttcacctgtgtgcgtgtttaattcatacatacgtatgatgccagcaccatataccgcttcaaataaatatcgtttatcttctgaaatcgatacataacaacctgtaccagcttttgaagacaaacatttatttaataaatgtaattcaccattgtcatcaatttttaaactcgcaacaccgcattgttctccttctttgttgattccatataaaacttcgttattacgcaccaaatatgtagacgcttctaattcaaatcctgtttctaataaatcaatacgtgactgattttcgtttaattcaaaacgataaatccctttaccattctttttagtgtaagaaccaatatatccatttgtcattacttttacccctccatgttagtcttattttcattttattaaattttagctagaattaacaatcatttatcatttccttaaagctaaaactgtttaactactttaaaagaactatttgctggtgatatgtcattattcgattttaattaatccctcttttttacttacacgagcattcattattaacgcgtttatgcttccacaaaatttctgttgcaaaatagaacacatgttcgtataatgtaattatcagattggggtgaattaaggatgacaagttatgaagaagaaactgattatcgtaacgttccaagagaattactagataacaatatacctatgggaagaggcatgattaaatgggctccatttattatatgtactaatctcataaaaaatctattttaatagggttcaaacataatttatatatgtattatgtttgaaccctatatctatttattttttactaatatcgtttaaaatgtctcgcaattcttcaatttctttgttatttaattcttcatttttcgcaaaattaagcactaaacttttcatatcccctccatacaatttattaagaaaggttttagcagttttcattttaatatcatcttctttaatatttgatgagtaaaaataaatattattatatttatatcgttttataatctcttttttatatagtcttgtaattaatgttctaatcgtcttatcgctaacttctttatttttttgaatctcaactacaatttcattagctgatactgattttttattccatattatattcataacatcccattcagccatagatatttcaacttgcttattggccatttaaaacacccatttcttttaatattttttcatttattaatttagcattttcaccagaggctttttcatctgataaatgtgtagaaaaataatacttatcatgatttgtaattacgtaacctacaaaccacccattattgtacttcccgtttactatacctgtacctgttttcccatacaattcataattttcattttttctaatcaataacgaagaagataattgtttcttttcatttttactaaaatggttattttgttccatcatatttttcaaaactattacttgttcaagattagatattttcaaactatcttccaaccaataggctttataacttcccaaatttttattaccataatttaatcgcttgagttgatcagaagtatagttctttgatatttgattactaatacgttcgaagtaccaattaactgagttttgtattgccgtatttaaatcttgatccttattccaagaatcgaaaggataatgattatgattccatgacatacgtgaatttttatcacttataatatgacggtcaagtccaaacagtgctaaataaattttgtatgttgaatcaggagaatatctttttctactttctttttcattataaatatagtatttgtctttcttcatgctgtacataacgaaagatccactatttgaaccaaaatttttactttcatctaaaatttggtaatcgctttgtaagggctttttataattataatcagttaaggattgccccattaaaaactggctttgaattatcatgataaaaaaagtaaaaatacaaataaaaattagaattaattttgactgctttttcaaattggcttcttttatattaattaatcttcttttgagtaatgattttttaccattaaatgaatggcttaatatatttttgttgaaaaatggggtttttaatacggaatccataatagcttccgcataagacttaaattcatttttgttaatattattaaggacaaatctatcggcttctacttcattgtcatgaataatctttctttttacaatttgtattagtggattataactcatagcaatagaaaaaatattaaagataattaaatgcaaagtatctctgtttttagcatgagcatactcgtgcaatattatatattttagttttttgtcatttatacttttaaaatataaactgggaatcaaaataatatattttccataccaaaaagttgttggagaatgaatagattctgcttttcgaatcacaatatttcttttatattgatgattaaaaagtatcttgtttattttatttttttctttttcatttagataaagtgactgtttctttaaatacttaagatataataaagaatttaaaaatttaaaacttaaaataataactaaaactatccaaataactgtgcagatattatctattgaatcccaattaaacttatggatgtctgttgtaaactcatgaataggtttagtggtatttatgttaggattcaaattgtgtgaattactttcaactgtgggctcttgattattcaaattattaaatttaaaaagagagaatttaataggaatgaaaggaattaatcctgcaagaagagttagataccaaactttataatttaacatataattaaaatagcgttttaatatgtacctaaaaaataataacaatagaaatataaaacaaaagcttactatgctcattattaataacttagccatttcaacaccttctttcaaatatttataataaactattgacgtcaatattacaattgtaatattattgattcatagaaattacaaatgtaatattggagggtatattttgaaaaagttaatacttttaattgcaattgctttagttttaagtgcatgtaattcaaccagttcacatgctaaagagttaaataatttagaaaaaaaatataatgctaatattggtgtctatgcattagatactaaaagtggtaaggaagtaaaatttaatgccgataagagatttgcctatgcttcaacttcaaaagcgataaatagtgctattttgttagaacaagtaccttataataagttaaataaaaaagtacatattaacaaagatgatatagttgcttattctcctattttagaaaaatatgtaggaaaagatatcgctttaaaagaacttattgaggcttcaatgaagtacagtgataatacagcaaacaataaaattataaacgaaatcggtggaatcaaaaaaattaaaaaacgtttaaaaaatttgggagataaagtaacaaatccagttagatatgaaatagaattaaattactattcaccaaagagcaaaaaagatacttcaacgcctgctgctttcggcaagactttaaataaacttatcgcaaatggaaaattaagcaaaaaaaataaaaatttcttacttgatttaatgttaaataataaaaatggagacactttaattaaagatggtgttccaaaagactataaagttgctgataaaagtggtcaagcaataacatatgcttctagaaatgatgtagcttttatttatcctaagaaccaatctgaacctattattttagtcatttttacgaataaagacaataaaagtgataaacctaatgataaattgataagtgaaaccgccaagaatgtaataaacaaattttaataatctaaatgtactacaaaaactgatataattctatctttcataaaacttcataatatcgaagaacatatatattatttataattatatatgttctatttttttatgttcacatttttaaaagagaaaatactattaacataccaaacatcataattccagttactataattataaatgctcgataatcttactcaacttttccatatagaaaataacttattttaaattaattaatcacattaaaaaattatataatccttgtcaaaggagaacatacgttctataatgatgatgaggtggttaacatgattccaaatcctaatgcgccagatgaatataaatatgaaactgattatagaaaaataccaagaaaatatttaaaccctaaaatccctcaagggcgtggaaaaatcaaatggcaaccttttgcgactctcccaaaacagtttgaaattttagagcaaatcataatgaatcaagataaagttgaaaaaccattgctaacatatgattcattagataatttagatcagattttccaagtaaaaattagaaatgatgagttatgtacaatcacatattgggaagacggtaacatttcaaaatatacgggaaaaattttaaaaaaggatgaaattggtaatacattttccttttctgatactaacaataatatatataatttaaataatgctaacgtttgtagtatcacttacaggctgggacataaagttcttaggcaatgtaaaaaagctgttttctattaattatttgatagaaatcagctttttttaaatgtatttgataatatacagctcgtcgagctgctattttccttatattaagtgccattaatacaaaacctagctctcgtttaactttatttattcctcgaactgacattcgagtgaaacccaaaatagccttcataaatccaaaaacaggctctacatcaatttttctttgactatagatttttttcgtttctggttcagaaagcttttgattaatttgggctttaaagtattcccaattataattcttcatgattttcttattggatttcgaatttggcttcatgcattgttgcctcaaagaacatgctgaacagtcatcgcattcatatagcttgaagtcacgtttaaaaccatatctatcattacggtatgcatatcttttaaaacctattcttttgttattaggacatataaattcatcattaagttcgtcatatttccaattttgagtgttaaaaatgtcacttttaaactttctagttttatctttaataaacatgccatacgtaataagtggcgttttattaaaatcatctataatagccatatagttttgctcactaccataacctgcatcagctacaatatactcaggtaaataaccgaaggtattttgaatcattgttaaaaatggaattaaagttctagtatctgtcgggttttgaaataggtcataggataaaacaaattgagaatttgtcgctatttgtaaattgtatcctggcttaagttggccatttttcatatggtcttccttcattctcataaaagttgcatcatgatcagttttagaaaagctatttctatctttaagaatcgatttttgttcttcatatttactttttctttcggaataatcatcaaatttctttttgaacttcttaatctcagttctttttttacgggtctgttttctaatttgagtacaatcttcgttctcaatagaatgatttaaatcttcgatttctttatctaaatgactaccaattaaatctatttcttctattgttaaatcgctatctccatcttcttttatctctggtattattttttcttcaactaattcacgatataatgcttttgaattttcgttcaatttcgattcgtgattttgaatacttttcttccacacaaatgtatatctattggcactagcttctacttttgtaccatcaataaaaattgaattatcatcaataagattttgctttaaacattgactatggaactgaataaataaagattcaattaacgcatcagtattaggattcactctaaaacgattaatagttttataagaaggtgtttgatcttgagctaaccacatcattcgaatactgtcatgaagtaatttctctattctacgaccagaaaatacagattgagtatatgcatataagatgatttttaacatcatttttggatgataggatgttgcgccacgatgatgtctgaattcatcgaattcgctatcaggtatcgtttcaacaatttcattaacatatcgcgaaatatcattttgaggaattctaacagaagtttctattggtagtgtaagttgggtcatgttataatttttatacataaggcacctcgttaatttagtttagtggtatttattaaattatacgaaagtgtcttatttttttaaagtatttcaaagtaaaattacatgttaatacgtagtattaatggcgagactcctgagggagcagtgccagtcgaagaccgaggctgagacggcaccctaggaaagcgaagccattcaatacgaagtattgtataaatagagaacagcagtaagatattttctaattgaaaattatcttactgctgttttttagggatttatgtcccagcctgctttataattacctttttcgaaatacttctagcaaaatcattataagtatcatactgatattaaatatattatttttatcgctgaaaaaaatttctactacttggaaaattgataaaagacttattattaacaaaagtttatttaagttttcacttctttcttcttccttatatgactgctccaattcaattagtgataattcttctttatttaattcttcaatatattgaggaggtttaaaatcattattattctttagatacaaatataaatataaactaggtaaaagctctgttctataaataattgcaatagatctcttgaaatttagtatccattgtctaaaatatagggcttctttttttccatttaaattatattgttgatacccatacaattgtatttcatttaacatagtttctaagaaaaagaaattagcagaactattgaaataaagagccatttgagaacattgttctaaaacatctccttcttgctcatccatccaaactacaaaaattgatgctttattcaagaaatttatataattatcgctataaccatcttgcctaaaatgtttactttttccttcaaatgaaaaaataggtgcatttactaaccactcttgaatcttcacgtcctcatagaaaggatcatcagtaaattcattttcattagctaaataataaacttcaaaacccatatttttagatactttatattcaaaaatatccttactattattttttataattctattaatttgtctagaaacatctctaatatttttacaatgtctattgccatacaattgataatgtttttgtctattatttttttcttgattaattagaggatatatcttatcttttccagatgagaaagtactatacaagtcgcttccaaagtctatactctctaaatcttcaatgatttctataacaaatgtaccattgttaaatatagttaaggttaaaaaaaataaattcaaagtgttctcatgagtaatttcaatatgtggagtgaatatatattttttatatttgtatccatgtatattattttgatcaaacaatccatcattaatatttacattagtagcaaatttttctaaaaatttttctagtttttcgtgatattcttttgtatgtcttttatatcttccaggtaaaacccaataatcataatttaccggggggtggtcaggagataaaatgcgtataactccttttacattcaatagaatttcctcaattttttcaaaccaagagttcatgttattatcttttatatttatagcagtagcatattgatatgttactttatagccttgtaatttattaatatcttcaagaatcttttcaactttattgtccattattttaaatatcctcatataacctagaatataaaacgctaatttcttctttcaacatttttttctttttctaaagaatttacttttctttttaaagaggagattaacgcatctttaccgtcatttttatttttatgaacaaatatttctctgttttgttcacgtaactcctctattttatttcgaattttattatttttatataatgtagctttagaaacttttgaatgtttagaaacgatgttaaagttaatttctttatttttttgaactaaatcatttattgctttatcaacttttttctcggttttaacttttcgttctgcatgcaactgttttaattgttcttgtctattaaatttttccatcttaacctctatacttttattctattacttctcccgaatataatgtttccatcttttatattgcctaatatttcttcatatttatttaatatatttatatgctttccaaccatatcttgtctattattatttttagctaattctatagatttgaccgttgatttgatatgtaattcatatttttcaacatctaaatcagaaaatccaatagctaaatccttacatggtttcccagaattacaagtcaggcatggcggagcttccatgtatggacaatcaccgctcaatctagcatgacaagtgccataaggattgtccattgcgtttaatttatgttcttgccataaagaattcaatgctttttcagatagttcactactatgctgtatatttttaattttaccgtcaacatcaaaactaaaagctccttgatcaataactgattcaaaagcctttctttttgtatcatcaagtaacttagcatatcttagagtcatttctggtgaggagtgtgctaataattcttgtatcgttaatatatctgctccaccatttaacaattttactgcataggtatgtctaaattgatgagttttgaaatggaagatttctccttgttcatcaataatatttttagtctttgataaatgatttaagtgtgctctgaccatatgttgtgtaaagggcattccctttctttttcctttataaatagcaaaaatataattattaggattattatcttttgtacttttacttttagaatcagctattaaaactgctattatatcagctaatttattatcaattggtattctatgtcctttaacaaaagttttagcaatatctgtgattattgaatactttccattaacttttgcaaggcaattattttctaatgtcaatacatcagaaattcttaatcctgttttaaaagctatccaaactacaggtattaaatctttatgcaaatcatttatatgctcaaaaagctgttccaatacaaaatctgggatataatcaatttggctactatttttcttttcgtatttaggtaagtcttgaggataaattaaaaaacgtatatcttggtacggtgctatagcatagttttgagttataatatcgtttaagaaccttctaattgtttttaattcttctctcacaaagttcttagtactttgcaaatttttattagctgcatattcaaataaaaattctatatatgcttcgatatgacatctatctagttcatttaaactattccttgtttctttatttttagatatattttgaaaaaacctagttaaaactcttatataaaacgttgctgtagcaaatgctatatcaccagttatcaaacgattttttaaatatttttttgctaattctcgcattttaattgactcaattttttcaaagtttaaataattgccagttagtgttttattataactcaatccatatttttctaaatttctaatatcccatttatctttttcccattcttctcgcttatcaatgaacttaattagattaatgtacatattctttaaaaaagaagccagcccgcttttgtattcataatcaccaaaaactattgttgacgatcttctttttattgggatattattttcagtcagccaattaaaccagtgcttttctaatgtatttatatcacaatcaagtaaagaatttaaatttggataaacttcattaaagaacttagcaatcttattaagctttactgctccagcattaaataaattagataaagaccaatcctctttaactatcagtttcaaaaaaaggtatttaaattctaaattcaaatttttacttttaatcctaaagaaaacattttttcttttgtctctatagttcttgatactatcttgaaattgcttgaatttgttaaaagctgtaatgtgccactcatcatttttaaaaaagtaatcatcatatatttcagttattaaaacctctccttttatattgatggctctactttgtaatgtacataattcattaatcatagtactgtttgtaggtaaattaattggtattgacatagtcattcccctttattaaaaacttgaaattgatgctttactttattccaatcttcacgtatatcttcttcagtgggatgaacatataaattaatagtcgtttgtatattactatgaccaagtctttcttgaacttgttttatgtccttagtttcattataaaaaacagttgcatgtgtatggcgaaataaatgaggatgaacatttatagatgttttatgttttagccttttaaataatgaatatatatcactataattcatagcttctcctacatttctcccctttatttttacaaaaagataatcagaacatattgaaagttcgtcaattatttcgtagacataatcatcgtataaatcaattaacgattgggaaataaatatttttctttccccagttttcaaataagtaccattatcattaaatctatttttcaaaactatttgatggccttttctaaagtcaaatttaatatcatcaatacgtaatgataatacctcacctatacgtaatccggtttcatatagtaattgtattaagaatttatctctaatattattagctttctctaataatttcttaacctccgcattagttaacacttctatttttttctttggttctttaactttcaaaatatttttcaacgttctatagtccttatttatgtgatgcatgaaacttttatattttttagggtatttactttccatatgcataaaatcatagaaattaacatctaattttttgctcctatagagataatcataaaaattagatactacagtcatagtcagattaattgtcttaggactaacgctttttccttttcggtgataagagaggacattctcatattcaaaaggtgttttcatccatcttataaaatcaacaaagttatcaaaactaacttctttatagcatatctttttactttctaagtaaacaaaaaatttttttagtgcataggcataggttttcttggtatttaaacttttcttaacactatccagatacttcaaatatcttactgcatctactataggttcattattaccatctaaaatcataaaattggtaccattcttagattttacttctactattttcataataatctcatttctaattttaatagtataagtatacactattcaaattctttttacatcatacatattaaacttattacacgtaataaaaaaagactatttaatatttttactttgttcattttttcttaaaatatgattcattttaaacaaaatagtctatattcttcaacatatatataaccttttgcaacattacccgaacaattcgaaacgattcaacaatacattatcgaccaaaacaaaattacacgtcctgtattatcagatgatcaattggctgagctaaacattcggctacacgaggcgctacaatatgcccaacctgtagaagttaaattttataataatggctttgtagattcagtacgcttaaccatttatcgtattgatgctattaattatgaaattgatggttatgtttacaatcagcaacaacgtcaaaaaatttctatctttgatatcttagatattgtcttgttaccttaatgctttgaacataattaaacagattgagtatatgcatataagatgatttttaacatcatttttggatgataggatgttgcgccacgatgatgtctgaattcatcgaattcgctatcaggtattgtttcaacaatttcattaacatatcgtgaaatatcattttgaggaattctaacagaagtttctattggtagtgtggttgggtcatgttataatttttatacataaggcacctcgttaatttagtttagtggtatttattaaattatacgaagggacccaacacagaaaattcattttattgaattttacatttatgcgcaagttgggcaaagtgtcttattttttaaaagtattccaaagtaaaattacatgttaatacgtagtattaatggcgagactcctgagggagcagtgccagtcgaagaccaaggctgagacggcaccctaggaaagcgaagccattcaatacgaagtattgtataaatagagaacagcagtaagatattttctaattgaaaattatcttactgctgttttttagggattaatgtccttgcctaaatgttattagttatttttactttcgatatcagaaataatttctttagtttttctttcaatatcttcaaaatcttttttaaagatataagcaaatgctactagaccaacaccagcaactaatgttgtaatagcaactaagctaaatacgaatttaaacacacatttaataaaattccacatctcaatttcacctctgttaaattaaatacctatctacatttcattatactatcatatatagaataatcattaaataaatacccacttttacgaaatatattcatcaaattatatagcgagcaagctaatgattattttcaaaaatgccgaggaacctctgtttcaacgtgacatgaccttatatgctaatgttaacaatgactattatcgtgaatgctaacttaagattgatatttatgataagatgattttaagtttttaacttaatatccccaccatctataaaaatatgttttaactgattgataagtcttatacaccgagaaatcacctcaaacaattttatatttcatttagtaaaatataactttatttaacatgacattcaatatacatacgattactatttatttacaatatattacaactaaaaagaaaggggccgatgatatgcaacaagtgacatcagatattatgacttttagaggttcacatttcgagttaggtgttaaaactggtaaatggcttcaacaaacacctcttctaaaaaatcgagaaaaagaatggaaaaaacgtgtcccacgtttcgatatagatgtaaatgaaacttatcaaatattccaaacttacgcacctcaaatatgggaagaattaatgggactacaaagtatactcaaaatgccaacacgccaaattattttaaactttggacattatcgttttaccgatttaaaagaaagtggttgcacggtctttcaaggcaaagacttcatggttagaaattatgattatcaccctgcaacttatgatggtcgctacttactatatcaacctacagatagcggtttagctcaaattggtcctgtatcaagggtaactggaagaatggatggtatgaatgagtcaggattaactatgggctataactttatgcaccggaagaaaccagcaaatggttttgtatgttatatgattggtcgtctaattcttgaaaattgccgaaatgtaacagaagcaatccaattattgaaagaaataccacacagaagctcatttagctacatactgatggacaaatcattgaaccatgcaattgttgaagtgacgccgagatcaatagatgttcgttatgataatatatgtacaaatcattttgaaatattatcacatgaaaatcgcaattatacaaaagaatctaaagaaagactagcgcgtaccatttcacaaactaatgataatttagatatgactacagcatttaagttattcaataatcctcagtatgaaatttacagtaaactattcaaaagctggtctggcaccatccatacatcaatgtatcaccctgaaacattaactgcatattttacattgggagaaaatgcgccaccagaaataatagatttccaattatggttagatggtcaagaccttaatatcactcactttactggcaatatagataccgacttaacttttgccaacaaataaataacaccgatattagagaaattatgcttcctaatatcggtgcttacatcctttatttattcaactttgatattaccatcaatcgtataaaattctaaaacattgtcgcttttcccaactttaccattagtaaatgttttatttttaactacgctatcacccgttcccggatttagctttagtatagtatcttcaggtttactatcatacttaaaacgaatatctccttgtttagtagaagtttttgcatctacttttgatggcatgtttttaaattcaatgtcaccatgatcgtttaaaaatatggattgtttaatttgactcttgtcgatttgtagcgtaccaataacaactttaatattactatttttaatgttacttttactaatataagtagaactattatttgtctttgaatctagtgcgtcaagattggagtttttaataactacttcaccgttaatgctttgaatacttgtgttctctaaatcaacatcactgattctaacacttcctgctccagacgatatatttaaacgtttaatcattttatcaggcatttcaatcgttaacgttttcttattctcatgaaaaggattcatatcaattgcatatcctcttgtcttagatcttttatcactaatcttcaacgtcttatctactatattaattaatatatcattgtcaccatcatatttaactctaaattgattcccccgttttatacgaagttctgtactatccaaatttatagatacattgtcaaaagcatcgtctttgaatgttttatcatattgtttagtaccatatttgtttttatcatagctgaaccaaataatggttgctgctgtaaaaaagacaacaaacactaaaagcccaataaaaaagaatttcttcattttctaacgcttcctttgacagttttaatataccaaagtaaatattttaagattaaacgataaatgtattctaaaatcttaaatataacaatgataaatactaatcctaatcctgaatatgatatggcaaaaaatacattactaattgagtctacaattcctctggatattgctgatgctaataaaataattggacaaaacagaagcaaaagtgatattaaaaataatgctaatacaaataatccaactatagatactggtataaggatgacaaaaatagatagaatgcctaaacttaatgaagcagcaacagctcttgaaatattttcaaatgttggtttagattcagcataatcaataacgcttctagcttttgtttcagctgcaacgtcttgtgggtcttttaacttctttaaaatttcctcttcatcaacgccattaagttcttgctcataaaaataacgttcatattcatacattttttgatctcttaaatgcctaggtagcgcatcaagtgctgtttctaattcatttaaataagtaatcttgttcatataggtcactcatcccaataaaattattcattcgttttttataactttaagacctaaagctatttactaaaaaattcaatacgtttaatttctaaatcttgataaagtaagtttaattttaaatggttatctctatcaatatactttaccgatgagaaatcattgccaacttttgttcttttatatccgaatccaagattttcaatcgcattatttattggcgaaccaattcccccatcaaaattagtatgtatcttttcatctcttactaatattatccccttaacgatgttatccttttctctcactttaacggtaaggtcagggtgagctttactgttataaaatttaaaacgatcaaacttaatttttttatttacttcatagccttttttatcaaatttctcatttaatttaatatcgtttatttcaagattagacaaatccacagttttcgtatgacgatattgatataaaccaattaatacaccaaaagaacagattaaaaataatataaacacaacccagcgattttgaatacgcactgatgtcaccctttctttgtacttatttaaatatagcataaggtgcttcccgtttcatccttaacaaaaattaacaaagaatttgcaattaatttatttcattaccttttattactataaattggtataatgttgtaaatgctaaaggaggtttttacaatgacaaatttagaaacttatttcaaaaatagccaacccttaaatgaatacattgatggaatgaagacaaatcaagataccgttctcagtatctatcaatcatttgagttaccagaagatgattcacgcatcaaaaaaataaaagagatgaattattctaaagtattagtaattactgaagactggtgtggagatgcaatgatgaatctcccaattctaaaacacatcagtgaagcattaaatttagaagtacgcgtgttccatagagatgatgatacaaaactgatcgatcaatatttaacaaatggtaaatcacgtgcaattcctatcttcgtattcttgaatgatcaattcgaacaagaaacagtttggggaccaagagcaaatgaagtccaaaaatttgtaactgatgttcgtgctgataaattaccgagcaaagatcatccggactatgcagatttagaaaaagaaacacacttagttatatcaaaccgctataaaactgacgcttcattttggaaagcagtttataattccatcctaaataaattagaaaataaataaatttacaataagacaaactttgaggttgggaaaatttaaaattcccaacctcaaaattatttttattaaatgtcttttttagcgacatataagatattcaaaatgaagaatatcactatagaacctaatgaaattacccattgccaattgctaaaatcaaagttagagctaatcattttatcagttaagtaagcaaaagggatataatcaaaagcatctaaaactttatcaccgtatcttgggataaatgtaataaaaggtttaataaacggtacaatgagtactaaaaatacacctaatgaaaatatcattgctgttttttgtgacgcaagtgtgattaagaataaaaacaagccaaagaatagtaaaaagattaggaagaaccataaattatctacatatttggaaaacgccaaattttttccattgctagatgcctgcacaacaatcaaaatcacataatgaattaatgcaaataatattgaaattaaaataattgaaattgttttcgaaataatgtatccaacgcgtgttttaactttactcatatatagttgaattgtaccttgtgaaaaatcacgcgtaattgtcttaacaacaaacattaatccaattattaacaataaccattttgctgcagcaaatacagatccatagacaataatatgtttcgggttatccatcgaatttgccataagtatactttgagttgcaatcaaactagatacgactagtatcgctaaatatgttaaaggacttttaaaaatactataaaaatcatacttaactaaatttaaaattctcattatttatcacctctttgatttatattgaagtacgtatcacgcaatgaacttttacgcgtttcaatatatttcggataaatatctaattcagataatgcttttagtataatttgataatttttttgtgcattgatcattaaatgtccgtctgctttgtcgacattttgtaattggaaatgctctgcaagatatttttcagttctatcaaagtctttatgatcaacagtaactatcgttgtgtcagatgcaacaccttcctccatgtttacatcttgaacaaaatgtccgtctcttaaaaatacagctctatcacaaattaattcaatatcttctaacttatgacttgatataagaattctcatatcaagttcatttactagagacttaattgtagtcagcacatcaattgagccatctggatccataccatttgtaggctcatccaatattaaaaatttaggtttattcattaaagatactgcaattgctaacttttgcttcatccccattgaatatttcttaactttctttttaatataaggtctcataccaaatgcatctataattttgtctgtgtatgctttatcaaaacccttacctaatacttgtgcaaataatttcaagttatacaatcctgatttattatcatataatttaggatgctcaattaaaaaaccgatattatctgcattatcaatatctacttttccatcaaatttaataatattaccattcattactttcataacggttgttttaccaacaccgttttttcctattaatccgacaattctactatcgccaaagtcaaaatcaatatcatttaaaacgacatttgagccgtatttttttgtaatatgttctaatttcatcgactgcctcctttaaattttctagtatttattttattgagctgtttaaaataattaacaataagtataacaatgcttataattagaaaaccaatatttaaaacatatgaatatagatctgggaatgatgattgacttagaacaaaataattcaccaacactattgcaattgaaaataaaaatggaactaaaatgataatagtaaacacgtatataccatatggcactttgactctacgcaattctgtaaattgactaaatgcaattggtatagacaagaagttagatatgacaaatgcatatgcagttgaaaaatagattgaatttggttcaatcacatctgcttcataagcatataaactaataacaagcgttccaattaatgttaaaacaatgcatgtaatatagttggcattaagcaattgtttttttgacactggtaaactcatataaaaataatatgaatcattaccacctaatctacgattgagtctaaataagtgaccagcatctaaaatccaaataatcaatattgttggacttataaaagattgcaataagtaaaagaactttgttgagtcaagcattatataaaaaggatataaggttaataatagaacatagatgataagtgtatatcgtcgtaatttaaaattcctaattaacaatgccttcatttaaaaaccttcttccatcaatttgatgttttcatgatatttaggttttctcttttcaagataaaccattaggttctcaatagaaggtgtagtgatattcactttatgacctaaaatttctttaaatacttgcgcatgttctgttaatcctataaatcccgtacgcttatgttcttcaaaaataagtaaagatgctaattcatcatcaaggtcctcaattgcaccactcacaacttgatatctttgtaacagttgttcttttgaaccatttaagataacttcaccgtcacttaagtgaatgatataatcagctattttttctaaatctgagataatgtgtgtcgacatgaatattgttttattttcatcaattaattcttgctgaattatctccaatagctcatttctagctaagggatcaagacctgaagtaggctcatcaaaaatatacaattcagcatgatgtgaaaatgcaactgctagtgataatttcattttcatgccagtcgaaaatgtttttattgatttattgattggtaaatcgaacttttcaagataaaattcaaatacttgatggtcccatttacgataaaaaggggcaatcattttttcaagttgcttcgtagtccatctctcattaaaataattttcagcgtaaacaaacccaattctattctttaactctatcggattgagagccatatcctcttctaatactctaataacaccagtttgtggttgatacaaatccataattaaccttattattgtggttttaccagcgccatttctaccaataaaaccagtgacaaatccttgaggaactttgaaagagatattctttaaattaaactgatcacttgaataattaacattacttaattctatggcattcatgatgattcctcctcataaatgaacgttaaaatatcttgaagttcctcaagtgacatttcgatggcttgcgcttcgttaaccaattctttaaccaaattttcaatggtaaaaaattgtttctcttttaaaatagaactatcttgttccttaacaaaggtcccttttcctctaattgttgtaacaaaaccgtctttctctaaatcttcataagcacgtttggtagtaatcaaacttacttgaagatctttggcaagttccctcattgatggcaaatgctctccaggagcaacatgtccctttaaaatattttgttttacttgttgcttaatctgttcataaatcggaaaatcactattgttttttaaaattattttcatcaacgtccccctatcaccttctgtatatatacaatatacacaatatacacagttttgtaaatatacattcttttttcttttaactgcttcactaacaaattaatagcatagttgggagttaaacagagatgataaagaaccacctatgatttattttgtagtggttcgtacgcattagccacagctaatgtgtccttaaaaataggaatgcatgagcgaaactcatgcataagaaagactaatttctaaagaaaaagtatttctttatgtttggggcacctcaacttgcattgtctgtagaatttctctgtgctggggccccgccaacttgcacattgttgtaagctgactttccgacagcttctatgttggggccccgcagtcaactactgccaatataactttgtagtgccttgaacattgattgatacccaatactcaacttttgttgtaactaaaaaagactgctaaaacgaatgtctttaatccctacgtgacaatcgtagcgtcaacataaacaatcgttttaaacagtcaattctatttattatttttacgtcgatcattacttctacttataaaagcacaaatcataaacataatcgctgctaataataattttataccttggctttcatgattagttgcttgtaaataataaccaacaataaataaaataattgcaagtactacaaatattttcgttagatgtttcaacttttatcacctcaacatcgatattataacaaatataagttttttaataagctattaaatattaacagctcaaaggactaattactttcaactaaagtagagcaacaaaaccattcatttaaaatgattattgattgcgatatattgtgttcaatgatattatttaagtgtatccactgaattatactacacaaccccaagtctggtaccagcagacttggggttatttatgtgtgtaggatcattttttatttttccatttcagttctaaccaaagtcgaaaaataattagtaagccacctgtaataagtgtcatcatcccttcttgccaccacatcattacactacacctccgttcgactaaagtatcatactgaaggatgacctacacctattctaacacaaaagcagaacatatgttcgtattttggtagcggattttacatattattcgttaattcaccaacaacactttatctttggtataattgaagataatatataggcatacaatttttttaaagagaggttaagcaataatgaatcctttagcccaaagcttaaatgaacaacttcaacagtcaaatgcaactgcctttgcaatgttatctgacttaggtcaaaatatgttttatccaaaaggcattttatctcaatctgctgaagcaaagagtacaacatataatgcaacgataggtatggcgacaaacaaagacggaaaaatgtttgcatcatctttagatgcaatgtttaatgatttaactccagatgaaatattcccttatgcgccaccacaaggcatcgaagaattacgtgatttatggcaacaaaaaatgttgcgtgacaatccagagctatcaatcgacaacatgtcacgaccaattgttacgaatgcattaacacatggtttatctttagttggcgatttatttgtaaatcaagatgacactatcttgttaccagagcataattggggtaattacaaacttgttttcaatacgagaaatggtgcaaaccttcaaacatatcctatctttgataaagacggacattatactactgattcactagtagaagctttacaatcatacaataaagataaagtcattatgattttaaattatcctaataatccgacaggttacacacctacacatgaagaagtgactaccattgtcaacgcaattaaagcattagctgataaagggacaaaagttatagctgtggtagatgatgcatactatggtttattctatgaagatgtgtatactcaatcattatttactgcattatctaatttaaattcaaatgcaatattacctgttcgtttagatggtgcaacaaaagaatttttcgcatggggattccgtgttggatttatgacatttggaacgtctgatcaaacaactaaagaagttttagaagccaaagtaaaaggtcttatacgaagtaacatttctagtggacctcttccaacacaaagcgctgttaagcatgtattaaaaaataataaacaattcgataaagaaatcgaacaaaatattcaaacattaaaagaacgctatgaagtcactaaggaagttgtctatgctgatcaatatcattcacattggcaagcctatgactttaactctgggtactttatggcaataaaagttcatgatgttgaccctgaagaacttcgtaaacatttaattgaaaaatattcaattggtgttattgcacttaatgcaacagatattcgtattgcgtttagctgtgtagaaaaagaagatatcccacatgtatttgattcaattgctaaagcaattgatgacttaagataattaatttcaaccaataatctgatgagtatgactcggattattggttttttatttttaaaattattccttctttcaaagcatcataagatatattttattcagcaacttgtcaaacactatacctaattagttttatacatctttcctaacaaaatttaatttatttggtacaaatttatataacttttggcaaatcacttcaagcattcaagcatcacatctctacaaatgtaaaaggcaccccacgattgtgagatgccttattataaaattaaagattaaaatttaagttcaatatctactttcttaatgtcagttgctttaaatacttttccatctttatactcagtttttaagtctacatattttgacgaaccatttttaaaatacactttatacactgcgcgttcagcaagtcctatgtcatgtttagtaatcccttgatcgtttgccattgctgatttaagctttatacttaagtcattaattgtaattttacttgcattatagaacacaaattcatttgaaactatgttttcaaatttatttattgttactgggaatttcacattattagatttatttttttttttgatttagtgtgttgtttcacatttatatcaatttttttaatatctttggcactaaataaattcggtgtaaagatgtttgaatttaaattcactacttgtttctttccatttttgaaatgtactgtatattgggcttgcttagcaaattttaagtcaagatcactgatacctctttcactctttaatacagattttactttgtcatttaaatatttataactaattaattgcttattggaaagttttaatttagataagattggtgttgatgtgccatttactgcaattgtgtatggtacataactctctgccttagctttaggacctgttttaacatcgacaactatctttttaatatcttttacaaataataaattcaattgatttatatttgaatttaaatccactacttgtttttttccatttttaaaatgtaatgtgtaagttgctttctttgcgaattttaattcacgatcagagatccccctatcgtacttcaatactgattttacttttttagttatatcactgtatcctacacgtgggtcacctgaaaattttaatttagataaaattggtgttgatgtgccatttactgcaattgtgtatggtacatatctgtctgctttcgctttaggtcctgttttaacagtaatttcaattctcttaacatctttcgcatgaactaagtttgctgtgtaattttttgaatttaactgtaagattcttttaccaccatttttaaaataaacagtataataagctttcttagcatattttaaatcttgttcactaatacctctatcatgcttcagtactgattttatttgcctagttaaatctttataattcttccaaggtttatttgaaaatgaaagattcgataaaatgtttgtagatgtaccatttaaattaattgaatatggaacttgatagtttcttttagctttattttcgacatgtttttttgtatctacgttaatattgatacttttaatatcacttgaatttattaaattcgctgtgtatatacctgctttcaaatcaataactttcttcgttccatttttaaaattaactgtatatttcgcttgcttcgatagtcttaaatcaacatcagtaatacctctatttgattctaaaactgatttaactttgtcctctaaatctttgtaactaatattttgattcttattaaatgttaagtttgataaaatattttggcttgtaccgttcacagtaattgtgtatggaacttggtaatttgctttatctttctttttatcttcaatatgctttttagtatctacgttaatattaatagctttaatttcacttgtattaattaaatcagctgtgtaaatacctgctttcaaatcgataactctttttgctccatttttaaagtaaacagtatattccgcttgcttcgatagtcttaaatctatatcactaatacctctgtctgattttaaaactgatttaactctatcctctaaatctttataactaatattttgattcttattaaatgttaagcttgataaaatattttggcttgtaccgttcacagtgattgcatatggaacatggactttagaatatccatggtgtaacgaacttgatgatttatctaatggcttagctccggcagacgcttcattattattaaagtttgcacctgttgatgctaaaacacctaatgctaaagttgttgtaatcaatgacttaaatttcataaattatctctcctttattatgtaattcgtaattgcaacttaattatagccagactttctctattttttgaattaactgaatattaataataaattatcattaacaataattttttaacactgttaaaagttcttttaattttgattaactaattaatttacaatacctaaaatgttgtttgattttgtttatatcaagcttcaaacttaaatgtcataacaaccttcatctcttaattccgattacatttgtcaattttatttacagtatctttatactcaaaaaacatttacttaaaaatataaattcgatttaataattaatttaaatttagttaatcaattttgcatctattttattgtaagctatataaaaggagtgataatgatggtgaaaaaaacaaaatccaattcactaaaaaaaagttgcaacacttgcattagcaaatttattattagttggtgcacttactgacaatagtgccaaagccgaatctaagaaagatgatactgatttgaagttagttagtcataacgtttatatgttatcgaccgttttgtatccgaattgggggcaatataaacgtgctgatttaatcggacaatcttcttatattaaaaataatgatgtcgtaatattcaatgaagcatttgataatggtgcatcagataaattattaagtaatgtaaaaaaagaatatccttatcaaacacctgtactaggtcgttctcaatcagggtgggacaaaactgaaggtagctactcatcaactgttgctgaagatggtggcgtagcgattgtaagtaaatatcctattaaagaaaaaatccagcatgttttcaaaagcggttgtggattcgataatgatagcaacaaaggctttgtttatacaaaaatagagaaaaatggtaagaacgttcacgttatcggtacacatacacaatctgaagattcacgttgtggtgctggacatgatcgaaaaattagagctgaacaaatgaaagaaatcagtgactttgttaaaaagaaaaatatccctaaagatgaaacggtatatataggtggcgaccttaatgttaataaaggtactccagagttcaaagatatgcttaaaaacttgaatgtaaatgatgttctatatgcaggtcataatagcacatgggaccctcaatcaaattcaattgcgaaatataattaccctaatggtaaaccagaacatttagactatatatttacagataaagatcataaacaaccaaaacaattagtcaatgaagttgtgactgaaaaacctaagccatgggatgtatatgcgttcccatattactacgtttacaatgatttttcagatcattacccaatcaaagcctatagtaaatagtgctcaactaactaataactcgcttcgttctaaaaagtctaagcgagttatattgttaaaatttgaattgactgagtctaggacaaaaatcaagttctaggctctataatgttatattggtattagttgactgcgtggtcccaacacagagaatttcgaaaagaaattctacaggcaatgcaagttggcggggccccaacataaagaaatactttttctttagaaattagtatttcttatgcatgagttttactcatgtattcttatttttaaatacatattagctgtggctaatgtgtaagaaccactacataataaatcattagtggctctttatcatttctgttccactcccatatttcttcattaatatagatatacttcgtctgcagttaaatatgattgatacattgcacatcataataaatctatctactcaaatataaataaaagttacctactacattctatgtagcaggcaacttttattacttatttcttttcattatcattaagtacttttacaaacttcacatcatgtgtcttccaatcaacttcatataatgctgataatttttcttcttttttatctacatggttttcgccagaccaatagccccagaaaccatgacgattccaatctattttaaactcatccattgatcttttataatgaacaacaaattttgatttaccttcatcttttttatcatgtgacataacagctaaaaattctggattaaacccttcagacacagttacaggcattttgtctttaggcgtaaaattatctttcgcccataaatttccatttcgtgttaaagaaaagatttcacttttagttctattatcactatcattagttaattgtctcgtatggtcatgtcccatattatttatcaaatgtgcttctactttccaacctacacctttatgtgacgtagattgatcaagtaatgtacgatatgatggttgttgataactaatcgtctctgaataattactctcttttgtaatatttccagttaagcctccacgattaatcgaaaaatctccacctgttttataaccatacgtatatttaacttctcttgattcatcctgattttttggtgcaaagtcagtcacatttgtattgttgttgtcatcaacattttgaattgaaactgaataagatccaggccatcttaatgtactattccaataaccatttgggtctaaaattctcaaaccactaccaattgtaccttttgctttaataaatactgtttctttatcataattaggttcagttaagaaattaaattgtaagctttgagtaatatttttttgactatcacttgttgtagctgtacgtgtatacattttagtatcaccatcaagattcttctcagaaacagctttaatttcagaattaatttttgcataagaagttgccggaaatacagttaatacagtagatattgctaaactacaaattgtgatgtttttgtataattgtttaatcattagtaatccgccctttcaatattatccttctttataaggtttattgtcatcagaatatttatcaacgactttaactgttttatttttccaatcaacttcataagtgacaattaatctttgaccatctttatttttttctaaaattggaggtgcataatgtattccaggtctgtttttcaaaatatcttgatttcgtgtgtatgttacttcaaattgcgttttctcatttgacttttcattagataaataagttaaaaattctggattaaagccacttcttactaatgctggatatctatattttgaagcaaagcttagttcagggttttctacagtagcaattctcgtatttctatagaataataattcatcatttctatttttcacttctccaccatacttcaagtcattcgcaataactgaccagtgtacatgccagttattatttttaccgctggcaattgtgtcataattttgctgattataactaatcgttttggagtagctatttgatgaagttcgtccaatacctttcgttgaatcgaatttaccacctgagctatatgaaaatgtactgtctactttcgcagttgaaattttatttttcggcaattggtctaatatttcagttttacgatttctttttacttgaaaatctacatggtactcacttggatactttaaccaatttgaatttttttcttctttatgagattcaaactttaaatttgaatgaattgagccttgttttttaacaagtaatacattcttgtcataagttggatcatcgataaagtcgaattgtaaattttgaagtatatttgttttttcatcatatactgtttcagttcgttttgtgattttaccgtttttaccaatatcatcaggtactggtgaatttttatctttattagtaacattacgtttgtctttttgttgagacttatcaacatgttctttcttattttggtcttgcgagtctttatgagctgaatttgcttgagtcgttgctgctgataacaataaaattgcacatgataatgatgacgctattaaaacacgttttttatttttcattgttataaccttctttcgtatgattgatatttgttgatatgtatcgacatgtgaataatatcacaaaaatagagaatatatatttaactatttattaaatgattttgttaatattattaaatactttatcctctttaaaaataatgtgtgtacaaagtcattaatttagcaaatgtttttatttagtagttaataaccatcgatttgaaatttatatataattattagctaaataatatcctgcatctttctcatacaatttactataaaattaagcatacccgatatcagtgttaataagattgttgatactagacagttaatttcatagaacgaaatcaaataacacaccactttctgcattttaaattatgtttaagaataaaaattatgtttatataaatatatatactactttgaaaaggtgtgagcttaatgacaacttttagtgaaaaagaaaaaattcaattactagcagatattgttgaactacaaactgaaaataataatgaaatagacgtttgtaattatttaaaagatttattcgacaagtacgatattaaatctgaaattttgaaagttaatgaacaccgcgccaatatcgttgcagaaatcggtaacggctcacctatactcgcattgagtggtcatatggatgttgttgatgcaggaaatcaagataattggacttatcccccttttcaactcacagaaaaaaatggcaaattatatggtcgaggcacaacagatatgaaaggcggtctgatggctttggtcatcacactcattgaattaaaagaacaaaatcaattacctcaaggaacgataagattactagctactgctggcgaagagaaagaacaagaaggtgccaaattattggctgataaaggctatttagaggatgtagatggcttaattattgctgaaccaactggatctggaatttattatgcacataaaggatctatgtcatgtaaagtaactgccactggtaaagctgtccatagctcagttccatttattggtgacaatgcaattgatacactgcttgaattttataatcaatttaaagaaaaatattcagagcttaaaaaacatgatactaaacatgaattagatgttgcacccatgttcaaatcattgataggaaaagaaatttctgaagaggatgcaaattatgcatctggtcttacagctgtatgttcgattataaatggcggcaaacaatttaactctgtaccagatgaagcttcacttgaatttaacgtaagagcagttcctgagtatgataacgactttatagaatcgtttttccaaaatatcattaataatgtggatagcaataagctttcactcgatattccaagcaatcaccgacctgtaacaagcgataaaaataacaaattaattactacgattaaagatgtagcttctagttatgtagacaaagacgatatatttgtttcggcgcttgtaggtgcaacagatgcctctagtttcttaggtgataataaggacaatgttgatttagccatttttggaccaggtaatccattaatggcacatcaaatcgatgaatatatcgaaaaagatatgtatctgaaatatattgatatttttaaagaggcttccattcaatatttaaaagaaaaataagaacgatgctgtcagctgccctattcgcgtgctggcagttttttattgcgaattttaagttgatagaaatagcgatgaatattgtttgaatgtaaatattcaaatatcaacaagcacattttcattgattaagtgatgtaaaactgaaattatggtggtgatttatcgtacataaattgcattgactgttgaaattgggaatccaatttctctttgttgaggccccaccccaacttacattgtctgttgaatttcttttcgaaactccctgtgttggggcccctgacttgaattgaaaagtaatacacatcagtaacatttctattttcatttatgatattatctaattattaatttataatataaaggagtatgcaattaaaatgaacaaagtccacaaacctttatatttttatttaatgctattcttctctacaactatcataggtgctcttttattatatttacctttcactggtaaaaagccaatatcttttttagatgccctatttatagcttcaagtgcatttacagttactggcctgtccccagttgatataggatcacagtttaatatacttggtgaaatagtaatactattattaattcaaataggtggtctgggtatcgtaaccgtaaccctattgacactagtatttttaaatagaaagatatcaatgaaaaatagattcttgattatggttacatggaatattgacgaacctggtggtgttattaagctaattaaacacttggctatttatagtttagtcactgaattaattggtatgatttgtttgtgtttatcttttataccaaaatttggtataggcaaaggtttatttttaagcttattcacatcagtatcagcttttaataatgctggatttgccctttttaagaataacttaatagattattctagtgatccaattgtcattattacaatctcaatactcataatatttggaggtattggacattttgtcgtaatagactttattaattgtaaaaaattgagtaaattatctttacattctaaattagtcttaactacaactagtatcctaataattataggagctattacattctttttattagaacagtttaatactatgcaacatatgggactagttgaaaaaatcggaaattctttttttcaatcagtaacaacacgaacagcgggttttaacagtatagatatagcaagcattaacaaatctaccgccttaatgttaatgctacttatgtttattggtggtgcccctctcagtgcagctggaggaattaaaataactacttttgcagtagcgtttatatttgttctaaattatatacgtaaagaaaataatgtttcagtattcaataaagaaatatctgacaaacatataagactatctattgttaccattaatatctcatttctatttatcagtatcattacttttatattatcgataattaatccgaacatatcattaatcaagttattattcgaagtggtttctgcatttggaacagtcgggttaagtatgaaccttaccacagaatatcatggtattactaaaataattattatattcgttatgctttgcggtaaagtaggactattaactttattaagaacatttataccaccaaaaagtcctaaaaattaccgctacactaaaggacaaatttatctataaaataactatccatctttaacaagaaatgaactagtgttttaatctattacatttaaaaaactacctaaacaggtagttttttatttattttaggccgattaaatgtcttatctctttaattaagtataatgcacaagtacacctttaaaaagatctactcaaaactaaactatacaatgatttaaatatttaaaacttattttttactacgttaacctcaattgttgaaaagatgaatggaaatgataatttaataatgtatacttttgattgtttaaacatgtacattttctaaaattctagagataattttattgctgtgaacaacaatgaaattatcttcagacataaatacggattttgaagttactactctttcatatttacaaaaattaataattgttatgatgaacttaaacatgaaaataagcaaaagtgaaatagctagacacatgggtgttgatagaagagcagttgataaatattcaaatgtctttgatctttattttataaattcttccataaaaataaccacactcctatatcaataggtgggtgtggttttgtgctttatattttaagaatagccatcttcaaattattttcacttgtatgatctttgatttctgtaaatccaaattttctataaaattctcttaatctatctacatcttcatactctatccaaatatatgaaccgccaaatatgttcgcaccttctaaaactttctcatatgctaaagttaacaaatcgtttccatttatggattttgtagccaatgcttcttcagaataattttttcctatttgagcaattaagtatccttgtatgattaaattgtcatttccactgtgagtttcacccttttgatataactttttctttaacgtgtttgatattttatctaacatacgttttgtaaaaactaagggtttattgctaattgtaaaatagccaactagtatttgtttgcttttgaattgtgaaaaaactaaatgagttctagacaggttttgtctatcaaatgctatagacttatttttcaaaaataaatcaacatcgtgcgctggttcacttcctgaaattgatattgtctcaaatgaatttagtatatttaaaactgaaggtatctttcgcttaacctattgcttatcacctgttaacaattctgaaagtgatattacttttacagtcaattacttcgatagtccttcaatagattttcaatctcacaagttgattttattttagtcgcttttatgtttgttttgttcacattactattattttcgttaatctccattgcatctattagtttttgcgctgatttttttgtgaatttataatctgtagtaatacttattgtagccatactactcacttccttattttacttcatatgacaaccaagtatacattgtctacattgtcttcttgtttactatgtatcatgaaagcatcttttcgacaatagattcaatatatttctttagtgtatatgattttacacgtaaaccattttgtttcttagcataaaaacacccatactgtaactagtgtgggtgttttcaaaatgcagacagcttcttactacaatacgcaaatgagtcctctgcaaagcctaaatgattaccggaaatctaattacattacaacatactagaagaaactccttatatactcaaaaggtatactaaacttctctatataatctatataattttaacattgaaaaagctccccattatgaatctcaataacacatcagcacataataaagacgcctctcataagtttagtcaactaaaggaaggcgtcttaaattaaaatattttcatacgctctaatatttatttggaacgaatcatactcttgcataatgtaattttctagttagtcaaaactagaaactgttttacatcattcctggcattaagggcggtatgaaatagatataaatcacatacaaaaatactattaaatcagtatcgtgtattctttatacattcaatttttttagtttttttatttcattatgaccaatttatgaccaccaattattacacacataaatctctataagtatatttgcaatgatcgatatgattatccatatgatgatttttcattgcaatataatgattctctcagcatcttatatcacctaataaagttaatgtgaaatgttaaaattgataaaacaatataaatttgtgcacccaacatcacttcataattaacgtattcaaatacgtattcactgcctgcaacgtgtgagattatctatgatataatcgggatcagaaccaaacggatttgcagcttttaacttttgcgtaaatataattattatagtttttgtaactaattaatttaactaattaatttaactaattaattaacttaaggatttcacctttgtccatgtttttcaagtctcttttacatactttaaccaatttattagatacagatgctgtagccatagaagtattttcaacgttattagacacctttttatcaaccgaaatatatacgtcggcatcatcgttagaattaaagacagattttgaaccttccttattcaatactccaacagatatagtttcattatatgcagctggaaattcttgacctccaaaaatatcgttaccgttagctgctacaataataataccttttccatgagcctcttttatctttttatgtaactcagggtaatttttagtaaatccataactcatatttataatgtctacatcatgtttaattgcccaatcaagtgctgaaatagtatcctccactcttccgttgccataacggttcaaaactttagcatcataaataactatatcagctcgatactctataatctttgaaattttattagcgtgtacgctatttctatagttatctaaagtgaaatcacgagatattacattgctattaatagctttctttttaatccctgtatctagaactgcaattttagtcttttccttcttgcaattatagttcaaacatatgaatatagatgataaaattagtattattaatattaaataaattttaatcaatttcatcgcttacatcaaacaagaggttactgtatttttgggagtaatttgtatatgactgcttatttataaaatatagccaaagccccctatcatcatacaaatggtacaatatgcctctttcactatccattaaatatatatctaagtaattatctttttgattaatcgtcgggaataaacctttaaaatcttgattgcaaatcgctctcgctaactttttataatttaaatccttcaaactcttatttttaaaagcaaatacataacactggatgccttcatcgttaatatattctttaaaactcggcgtttcgtcattattgaaataactaaacttttctttgaacctagtttttttaaatgaatttccatataaataatatactagaactatatcaatagtcttactttgttgaaataaatcttgtaaaatttgaattgcatttctatgaatctttgtaaaataatttttgttaaagctttttccatcatctaaaaaaggatattcaccttcacttaaatctaaatgcattgcattttcaacttcagaaaaattcaaatcacttactgacatacaattaataatattatccattttttatatcatcctatttacgaagtatttttccatctttagttaaagtggcttttctagtaccacttttatccaacaatttccaatacgatcctccatgaggctcccctttattccttgaaattgaccacccagttttaggatctctatagactgggtttttaccctttactttttgagtgaactttccgatatccacccctttactagttagaagtctagagtttattcctttcgctactttatgcgtatttgattttatagcgttattcacagcttttttaccatactttttaatagcccattgaataccataccttgcagccattactgccactactactaaaggcgcagcagaagcttcagccaatcttgtatcaaattcatgctcctcaccggttgaattatctattaaaaatccagctatgtcttcttcatccgcataggttaaatcaattgtataatctacttgtttagattcttctacattagagatttttccagataaattaatgtctcctgcattaaaatcattagttaatacagtatctaaatttatttcattattatttattgatgtagaaagacgtgatacttcgccaattttattctcactaatttttgtatttttaacgctttcatttacttctatattttctttgataattttattagatgcatctgtatttgaactcccaaccccagataaaatcaaggatattattattgtacatatacacaatttcgaaaaataaattttcatatttacccctcctagatatttttaaatatcataatatattttcaatattctttcatatctataaattagtaaatatgcaacaaaacaatttaaatatatctttatacttttagagtgtttgcactcttgaaaagtattatcacaaaaagccttatactctgtgcaaaatcaattctatcaatacattttcaaaaacactcacttattaaataacattttataaaaatgtaagtttgacttaatatttttaaacttttagttaacacctcattccatcacatccgattatatttacttaaaacaggactgcaccattttattaatacttctagactaataaccccaaacaactataactgtaatattatatattcctattacaaaaaagacaggtaccgaagtacctgcctagagcattccaaactattaggagcgcaggctattaaaagcgagcgcaataaatactatatcatattctctatgttattgaaactaaattaatacctttaattcctaagaaataagtaaggacgttgcccctcccgtttatacaatacccataaataacatctatataactaatttatgcaattttacaaggctcaaaattgagctctgccgttaaattcatagtcttttcatctggcgttttattttcgccgtttgatgtaatgtgttctttggtgcattctggttcaaaaagagttgcttattagtataaaatacttgcgcccatatatcacactggtgggacatttaattctggattttcagctattttcataaatctattagctgataattagcttaatccaatttttcaagccatagcctaaattctccatgtaccaaatcattctctttaacatgtttcaatcttcggccaatctcaaagatagattgaccagcgatgtttgagattatatttcacgaggtcacatttacagttaaagtgtatttgtgcgtggttcccattcctcactgcaacacaaagcgtttctaagcgcataatatccttaacatacttaatagatctaattaaattaatgactcttaacatttaagaataatattctaacgcttaggcaaaaaagtactatttttaagcctagccgtcataattatctaaaaactgaggtgaatactatgttaaatactatagttacatatttctttatctttatttttgttttttttcctattttctgtatattcttttttgtaattactttagttagagacttaacaagaaacttcaacaatttaaaagtaaaatatattgtctcaacccataataaaactggtaaaacaatacttgaattacgttactttatatgggaacttagaaagcgtaagtattttataaatctcataatgaactctgaagttatttatttagatggaaatatacaaattactagaggtgtgtactataaagacgtaccaccattaaataatttcaaaaacaaatcgttttttcttaagtctatacgaatttttgaaaaataatatcaaagctaccagaataggtagcttttcactttgaacttcatataatattaattgctatacatccaagtaacttttattaaatcaatcctctaacggaatatcatccacaatcacagtatgattagggttagcgttagatacatctttcactgccttatctaactcctcatcttctccgtcccattcaccaatattaatgaatataggaacattcccgttaatatcatgcttatctgtaaataacttatggtatttacccaacatatcacgagcttttaaacgatcacttggctttattggtacctctatcagttcaacatgttcattatagactaattgtactttgccactttgtggattctctttatattctccacgcttgactacaacttctttcgtttctgtttcatcaccgactgccgcattcgtaagcacatgtagtaactcttttgtggttaatacattctcatctataatcttatctttttgttcttgtatatattgcttgatgtgtggcttcttcaataacctacaccctgtcacatgtgcgctatttgcgctatagcctgattttatggcactttgtgttacattaagtgttcttatatactcattcacaaaacgcgcttgttttgccgttaactcactcattctatcacctccacaattttatctaataaggtttcataccataatcttacagattgttctgaacactctaagacattgctaatatctttaaaactacgtccttgtattaaagaatcgaaaatataaaactctttatcattagctacttggtcaacaatcatttccaagtgattctttgcaatatgatcatcaatgttatcgtctgccatccattcattagaattttcatcacctattgaaaagaattcatcggtatttatttcatcatctatcaacacatcacttctagttcgcttatgataatcacaaacgaagtcttttatttgctttttatccattgttacaccacttttacatatgaagattggtgatatgcatttactcgtgcaatcttactgttttcaattgctgtatttctttgtttttgacgttctgaacgttgtttaatacttgcttgatacaaatcaacctgtaagcgttcaatgacgttgaagggcttatatcgtccatttgaacgcatatattttacaacttgcttctgctctttttctgtataatgatttagtacctttttcaacaacgccatattatttatagatctatttttatagttttgtaaccctgcttttgtttcaataattttgataactaatttttcaatcggatatgagacagacacgacccccattatttcatcacatgttgtggtcgacgcactcatatggtacatactttcaatttggaattcacacatcttaatttttttattaataaatgctgggttaaattgcgttaatagttgatactcagatagtttattgtcgacattacgataatataaaacgttcttagatttactcagtttcatttatccaccccactacttaataaagccaaaccaattaaggcttggcttttgtctatttgttttttctaatatttactttatcagctaaatctgaaatagttggaacatctcttacgtttcttttttcctcatcgttcacatcttctttaagtgcttctaaaatagataagcgttggttttcatctaattcagcattgtttattgcttctaatgttttactaaattgcattatttcttaacctccaattttttgtgttcattgaaacgaattgattttgtattaataagaaagttgttgaggtaaagtacaatcacttcgccatatcgttgtctaaataaattatcttttttcatttcattttgatctatcaaggaatcgaacttatacatatcttctcgatattcttcattcatattgttgattttatcaataacattattaaactgtttgattgtaccttctaattcacgcgctaaaatttgtgcttcctcttgatataactcaggaatattcttcctattcaacaataagtctatgagtttttcgcgcttaatactgttaaataattcctttttaatttcaaatcttttattatcttttgctttctcatcttctaattttgaaatcttattaaacgtcttatcagcctcattatcgttgccaacttttatatactctttatatttggaagatagatcttcaatagtttttgtagtattttcaattttagattctaaattattaatttcttctttgtagccttttacttcatcggaatatttttcaaataaatgatttgttttcatttatgttaccctctttcatttcatagttatcatgttacacttcaatttcttctagggcttttaaacggttctgactgccctcaattaagcccttaatacttttgatagcttctatcttatcagcttgtgttttaatgatgtaatagcctctagtatcttttttatagctatatccgataggataatgataattaatgattaagcttgtaatgacttgtgttaaccatctattgttagccttattcacttcatatcccaattgattaagcagctttgttttagtaatatatttattagacgtatttcttatcacattgagtacttggcggtgttcattcggtaagttgtacgtcttttcttttacttcaaattcactcattgtctcaccatgctttctgttgtttgcttactctaattataccaattctacacatctaaatcaaacttatgttcgctataaatcgcattatatcaggtgtttagcatcacccctatccctcttaaaacaataaacaaaagaaattccgtagtaaaacttagtagtttctacagaacttaagttcccgttttttacacgaacaaaatacgaacaacaaaacttttgccctcttcaaaaataacaaacattaacatatattatctttttaaattttttataccttattaaaaccttattacttttatcaatatcaaaaaccacttacctttagtttccttcttgacgcaattcttcgtacctatctaaaatcgcactattcttataacctacggaaaagcttggggttttcacttcttcttgattcaattgctcatatttatcccttttctcaccattttgcaaccctggtataaaacattgttttctttctacctcaaaattactattttaaagttctgtacctcgcttttttttaaccttgtacaccttcctatttcattgttctcagagtctgcgcacctttgggaaacttttgggttttaaaagccaacaccttccgaaaaccttaccattttaaacttctataccttgtacaaaccttgccgtttttttataaggagccacatactacatgcgactccctcataacattatttacttatactataataagacgcttttagatcattcaatttacgttctaaccccgtgtaatcctcttgtgcagccttctcatcttgtacaaactcagttactaatctcaacccctcaactaactctggtgctggttcattgattcccgtagctatctgatacaacatttcaatattcgatatcacatcagtattactcgattgaatgccctcaagtgtatctgtatcaaatccattttctaggtactcaaacacatcactattatttgattctacatatgtttgtagcccatacataaaatactcatcttcaaataattgactggccatcatatcactaatagaaagctgtttaccatcatgtaattcataacctacataatgcccctctatgcttcttataagcccctcagtgtgcttaggtgacgctaattcaaatgacttcctcaccttacaatctttaatatatacatgaccgaataacttgttgttcatcaccacataaaccatatcaaatggatcattatataacttaaagcaacatggttgtactttactatgttctaataatcccgtgtagtaccttaatagcgtgcctgctcgcgtctcaaattcatttacgatagtttctatgttcatttgattttctcctctttatttattcttaacaccataggcacccatgagagcacgtcagtttgttgtccatcttctggataacaaatagctaatggtaagttaggaactctaccatccaacaaataacgcattacaaaactacctctatacactaaatcaagttgttcacttttaactaattcaatcagcgcaaacattgtaattttgttccatccactccaaaacactacattctcatccttatcgtgtgtgatactagttctccctatatagtcgtgatttatttctttaaacaaatcttctaactgatatatcggtatctccttatattcttttacataatcgtatatatatattttaagttgttctttatccatgtgtaacctccagcattaatttgatgttttttattttagtaggggactagtccccagtgagtccccaccctaattatttattggggactgtttcacccgttgatataactgattttgttagaaatagtccccatagtcaccatatttataaacgatggtagctatatattaaattacactcaatgttctttttgatcattttatataaacactgtttttttattggggactttggggactaatctctctaaagtcttgcggtaatagtgtttattaagtccccaatcattcctttttagtggggactgtttggagactttggggactttttaattatatggattatgtgaattagaaaaatcaaaccctaattcttttataatctcatctttaatggcataccctctattcttttgagagttaaatctaacttctttttgtattctgtctttactagttattaaatagccctttttgtcccattgtcctgtgatagtttgcatttcatgacctaacttgtcgtatacagtttgacctaatatacataaataatcacgtttatatatagctttggtgtcaccatttttgactgaactatagccatcaccagcgatattatttctatttgcatctaaatattgtaatagttcctctaacagttgcttaggtttatcaattgtcttattgtttttaaccatgctgtcataggtttgttcaataattttaaaatgatcatgttcaaatccatcaatatcattcaaaacctcaccagtaacttgtagtaacgcaaaggcacgtcctaaccgttgcatgatttcattactacctttttgattaaagtaccgttgatagctctcaaaagcatttttatacacgtcttttttagactcatattgtttaataaatgccaaccctaacgttccatagttctccctaaacgatttgtctaatgtggtaaaatcaaaattatctggatatggttgatcttgtagtgtaactacacgtgctgatacacccgctttttcatcagccatatttgcgatagatgattcaccagtagaaattaaaatatttcgccattcttttttagcatttagcgttaaattaatattacttctcgatttactttcaccactagaaaagttatacgtggcactggtaacaaacttaggatgtgtgttacgtgtatcatctttaaacattggaaatgagttcaaaaatgacgccattgattcaatactattttgagtagaactccatgtcgtaataaggtcactggttccccaaacacttgatactaagttgagtgtgaatgttttacctgtggatgtactacctgatatttctacaataaatggctgtaatccgaattctcttaataaaaccgaacctaaagatgcatataacataaccattaccattggtagatcttttatttgaccgaacacttttttagagtaaccttctaatgttcctttgctttgaaaagagtctattaacttttgaaatcctttatcattactaaacaacttgatattgctgtctttcatcacttcttgataaggataaataaaataacctttcacatgtcccaagcgcgttgcaactttaacatttaatggtggattataccttttagatacattaatatagtcaacaagtttagtagatgtcgacgatgttacatctagctttttattaaccaatttcaagagttgacgactatctgaaatttcttcggcactcacagctatatttactggcgttttattgtcatagaaaagcatattaaagctaacttcgttactctcaatatcttcaaagcgttcagtaatttgagggattgtatttgtgataaaaacctttttatctggttcgccttcttttttacttggtataagttggtataaggcaacaccgcattgatgatgttcaatttcatagcctttcggtataatttcttgtaaggcactatcttttttattaattttttcaattttatcaagtacatcacttttacctgtttccatacaaagctcctttctaattgttatagtgtttatttaatatcgattgaaaagtagcgttgatttcttgttctttcataggtggtttacatgcgaattgtccccataataaagcaaatgaataaacaatataatcattaacgtgacatctcaataaatgcccaattaagctagctagtgcattgttacgattgccttcggttgttccaaagcatagctcgcgccagtactcactatcgcgtcgagtgtatcctatgacattaggactagcatttgattgttcaaactccttcgaccactgttcgagcatatcaacattcataattggacagtcattcactcgcttaataaatatgtgtcctttttgaataactggtaacgcaaaacatctacttggctgatatgaaccttcatccactttatggccaattttatttgctaatacttttgtatatttacgataatcatctgcacttattcgctcattcagagggatatataggcgtattctagcttgttcagttgtatggctaaacgatgtgtgccaataccatgcaacactgcttaaaactgagctgattgcttcatgtaattgctttaaatcatttatttcatcataatcaagtacaatcacatctctgtatatgacattaacgtcattgcgatgcttttttattgtttcaccatgatcatttgcaccgtctttaatatcaccgtacacagcaacaccacgtgcatacttataattcgcttctataggcacagacagtttattaaccaacttactccattcaggttttgaaaagctcttaaatgaacgtgagtctaaactttcataatgtaccactgaaacatgtgtgtcatattctaatttaatttcattcattttttgcacctcttaatgaaacaacagagcaaagatgttataataaaaatagttattttttattaattactctgtaatttttaatttctttgcgtcatctgattctgtcgccaaacttacatcagatgatgctttttctatttcatgaaatttttgtataagttcatcgaactcttttaaataaacctgtaataactcaactgtatgttcattttgtatacgatgttctaaatagctagcagaaaaattaatatgttcccgttttgtttctaattcattttttacaaatctatcttcaacaaaccaagcatgtttggtagctacatcattaattttttgttttatcacttcaatgtcacacattaaatctttaatttcccaattcatttttattctcctttctctaattgaaaattattctttaattcttgtgcgcaccatttcattatcaattctaagtgcttttcacgactgatctctgaaaccacttcaataccattaacatattctgtgtgttcgtaactttccaaattattcatgacacttaactcaagttgataaaccaagtgttctattacttctttttgttcattattcattttctaatcctcctgttaaattacatcctaaagttattagccaagcataaacgctaaaagcgacatacatgttagatattgctagtaataaaattgttaacaatgaaactaagcagatataagttaagtagattttcattgccttgcctccaataactttttgatattgacttgtttaaagtcgttattctggatattcatatgagcagtaagctgttccatgaattcatctacatcagactttttgaatctatacgtagatccgaccatataatatttcatgccattattaataagtgattcttcaatagtaggcttacttaaattcagatagttagccaactctttataagtcataaaatatttctctttcgctaattcgtccacacgtgcattgatagcctgctcaagtaactcacgtgcttcatcttcatcaatattaatgttgaacattggtttatgcctcctttacttcaaattcaaataattcatttacctcaacttgtaaaacttctgccattttcttagctaatttagggcttggaatctttttaccattaataatttggcttaaataagaaattccaacacctgtttcacgtgataaatcagataaattaaagccttttaagaacatggcttctttaaactttctagtattcgctaaaatagtcataattaaaatcctccttcgtttttgactgacttctcaatcaatttataactttattatacataatcgtttttcttttgcaatagtttttcgactgacttctcaatcattttttatttttttgtacataaacgtccaaaaaaatgctattattaacataattaggaggtttgtaatgattagaaatagattgtctgaactactgtcagaaagaggactaaaaatatctcgtgttgcaaaagatgtaaaaatagcaagaagttcacttacttcaatggcacaaaatgattctgaaatgataagatatgatgctatagataaattatgtagttatctgcacatatctccttcagaattttttgaacataatccgatcaattttgactttacttttgatgaagaaccgaattataaaattaatgatgttttcgagggatttgaagtaactgcaaacattactcacgctttttcgattgaaaattttgactttgaaattttagtagacgtcgaattagataataggcaaaaattaaattttgacttagacgtctcatataaagaaactgaaaagataactaattcacaacatagatttattttcacgattaaaaatgaagatgaaaatatcggattaaaaaaatacgttgatagtttatctgcaggccttaaaaacttgttatttaaaaaaattaaccaaaagttaagtgggtatgtttctgaaataatagtaaaaaatatagacgatattgaagagctttttccaaataaaggcgaaaaaagtacgactctacataaagaaattttacaaactgatagccgtttatctagtgatatttttaaagaatattaatcgaggtgatcaaatggcaagttatgaaaaacgcggaaatacatggcgctatcgtatatcactaggaaaagacgcagaaacgggcaaatataaatatatttcaaactcaggttttaaacgcaaatcagacgctaaacatcacgctgaaatggttgagcgtcaattaagaaatggcgattatatcgcaccgtccacatctacatttaaacaggttgctgacgattggatatcacaatatgctaacgaagtaaaagtaagtagtgtcagagcacgcgagaaagccataaaccacgccatagaacgctttaacaataaaccaatacaaactatcaataaacatgaatatcaacgttttgtaaacgatataagcgcacagtatagcaagaattatgttgatagcattatagcctctacaaatatgatatttaagtacgcatacgatatgaaattaataagaataatgcctagcgagggtattaaacgacctaaaaagaaaattagtgtggaagaattagaagatactgagatacataaaaagtttcttgaaaaagatgaattatttcaattcctggaggttgctaaaaatcaccattcaccccaaaacagctttgaggtgttttgtacattagcatatacaggcatgcgtgcaggtgaattattggcattgaaatggtctgatatagactttgagaataacacaatcaatattacaaagacttattacaatccgaataacaataaaaagcaatttcaaatacttacaccaaaaactgaaagctcaatcggaaaaatttcagttgatcctcatgtgattaaattacttaaaaactataaagtggatgttcaggatacatggaaaaacgaattgtatgtagataataatttcgtttttactgatgttaacggctatcccctcgtaattaagaaactacaattatggataaaagctatacttaaaaagactgacataactaataagcaaataagcactcattcatttcgtcatactcattgtgcgttacttatagaggctggtgttcatattaaggaaatacaagaacgcttgcgccataaggatataaataccactatgaacatctacgctaagattacgaactcatacaaaaaagacgcttcccaaaagtttagtaaactcatggaaaacgtctcaaaagatttattttaaaatttctatgaccaaattatgaccatccaatattacaaacgttataaaatcagcgttcaacagtctttttacatcattcctggcatgccacccatgttaggttggtcattatttttttctggaattgatgcaacaaccgcttcagtcgttaagaacattgccgcaacacttgctgcatgttgtaatgctgagcgcgttactttagttggatcaacgatacctgtttctaacatattaacccactcgtttgtagcagcgttaaaaccaacacccggctctgcatttttcaagcgttcaacgatgacagagccttctaatcctgcattttcagcaatttggcgaactggtgcagttaatgctttaagtacaatattcacacctgtttcaatgtcgccttcagcttcaatttcacttactttttggtaaacatttactagtgcagtaccaccacctgcaacaataccttcttcaactgctgcacgtgtagaatttaatgcatcttcaatacgtaatttacgttctttaagttctgtttcacttgctgcacctaccttgataactgcaacaccacctgctaatttagctaagcgctcttgtaatttttcacgatcaaagtcagattcagtttcttcaatttgagatttcaattggcttacacgtgcatcaatgctgttttcgtcaccgtcaccatcaacaacagttgtattatctttagttacttctactttacttgcagtacctaacatatctattgatgcatcttttaaatctagacctaaatcatcagtaatcacttgcgcaccagttaaaatagctaaatcttctaacattgcttttctgcgatcaccgaaaccaggtgcttttactgcaacagctgtaaatgtgccacgcatacggtttagcacgatatttgttaatgcatcgccttcgacttcatcagctacaattaagattggacgattagattgaaccacttgttctaataaaggtaagacatcttggaaagaagagatttttttatctgttactaaaatatatgggcgttctaattcagcaaccattttatctgaatcagtaaccatatacggtgattgataaccacgatcaaattgcataccttcaaccacttctagttcagtgtttagtccatttgattcttcaattgtaatgacaccatcgttacctactttttccatagcttctgaaatatagcgtccaatttcttcatctgctgctgaaatcgcacctacttgcgcaatttcatttttattttcaactttttgagaattttcatgtaacgcttcaacagcaactttaactgccttgtcgataccttgtcgtaaaccgactgggttcgcaccgcttgtaacatttttcaagccttcttgaatcattgcttgagctaacactgttgcagttgtcgtaccgtcaccagcaatttcattagtcttatttgcgacttcttgaactagtttagcccccatattttcatatggatcttctaattcgatttctttagcaatcgttacaccatcgttcgtaattaaaggtgctgtaaactctttatctaatacaacattacgtcctttaggaccaatcgttactttaactgcatttgctaattggtcaacaccacgtaacattgcttgacgtgcatcttcagagaatttcaattgtttaaccataaatgataaacctccatttgtttagtcatatttcattttcgttctttacaatctatctatgaattatattctatattattcaattactgctaaaatatcttcttcatttaatactagatatgtttcattatctcgtttaacttctgtaccagcatattgttggaacacgacacggtccccttctttcacttcaggagtcactcttgtaccatcatttaatagacgtccagttcctactgcaacgataacgccttcgtttgatttttctttagcactatcagttaaaacaataccacttttagttgtttgttcttgttcttttttctcaataatcacacgatttccaattggttttagcatgattgttcctccttaaaaaacctaaagtttagcacttaacattatagagtgctaacatacattcataataatcaaatttggtcaaaatttcaagtcataacctttcaattaagttttgtaacttcaagttatttacgataaaataaattataaacaaatatttggaggaaaattatgacaagactatgggcatcgttgctaactgttattatttatatattgtctcaatttttaccgcttctcattgtaaaaaaattaccatttgtacaatatagtggcatagaactgactaaagcagtcatttacatacaacttgttctatttttaatcgccgccacgacgattattttaattaatttaaaaattaaaaatccaacaaaattagaattagaagttaaagaacctaaaaaatatatcattccatgggcattgcttggatttgcactggtaatgatttatcaaatggtagttagtattgtatatactcaaatttttggcacacaacaaacaagtccaaatactgagcgtttaatcgttattgcacgaaagattccattgtttatctttttcgtatcaatcgttggtcctctattagaagaatatgtatttagaaaagtaatctttggcgaattatttaatgcaattaaaggtaaccgtatcgtcgcatttgctattgcaacgactgtaagctcattaatctttgcattagcgcataatgactataaatttattcctatttactttggtatgggcgtcattttttcattagcatatgtatggacgaaacgacttgctgttccaattattattcatatgttacaaaatggattcgtcgttatattccaattacttaatcctgaatctttgaaaaaagccacggaacaagcgaattttatatatcacatttttattccataatataaaaaacgaatcacacacggattatcgtcgctgtgattcgtttttatttttctttttatttcgctttacaaataagaatagcatgattgaaaataccaccatcatagaacatacaattgctagccaacttttactatatgcagttgacgcacttttcttattatcttcttgttttttaactactgtaaaatcgtctttttcatgcggctcaaatgaacgttgttttgaatccggcttatcttcgggctttttcaaatctggcattgatccaatttcaccagtaattaatgcgagtacttgttcatctaaattacgatagtacctttctgatttcaatggattgaaatattggaatctaaagtaattcgattgctgttgtaatccatttaaatatgcatttccgctgaagttttgtttgcggatgatattgtagatatcttcatcagttacctcaccaaattctttacccaattgattaatttgatttaaaatatacggattatacttgtatgcaccattcgctaaggctaaaaatcgttgggatacaaaatcattaccagtaggattttgtgagtttccttgatttccatttggttgccattgaccttgattagatccatctgaagcatttgggttccatgtacccccatttttcgagccaccagaatgattggaatccccaggttgattgggatctggtgacgggttaggatttggcttattagggtctggttttggatctggatttggctttggtttatctggatccggttttggtttcgggttatctggatctggttttggatccggttttggtttcgggttatctgggtctggctttggttccggatttggctttggtttatctgggtctggctttggattcggaactgggcttgggttatttgggtcaggttttgaatctggacttgggttttggttgtttgagtctggcttcacattattcgaatcaggattagcatcacgactattcgaatctgttccttcattacccgtttgatttgattcgggaggtgtcccagtctcattattatttatttcactatttactgatggtgaagttacattatgattcaaattagtagttggcttttcttcatttaagttatcctttgcttcaactgtgtctgttgcaagccctaaactactactacttaaaattaaaatacttgttgaaagtaacattttcttaaaccaatgatatgacatttcacgagacacctcccttttttatgtaagtattaatctaagtataataaatatgcgttgaaaatgcatttatatttggaatttgaaaatgaatattaatattcttgaaattttcgtaaatattactttacaagttcgagtataaattttatacttagtctattaagtattctttactaaagaaggagcaataattatgggtttatttaaaaaagataaaaaagcaatgacttttgacaatgcaatggaagaaagacgttcaatatataatttgaaagattcaatatcaattagcgatgacgaattagaatcaatgattgcacatgcagttaaacatgttccttcatcatttaattctcaatcaactagaattgttctcttattaaatgacaacaataataaattttgggataacacaaaagcaattttaaaagaagtcatgggagagaatcgtgatttcgagccaactgaacaaaaaattgataacttcaaacattcatacggtacaattttgttttatgaagatcaagatgttgtaagtggtttacaagaacaaatgccaaactactatgataattttgcaatatggtcaactcaaacaaatgccatgcatcaatttgcaatttggactgcattagctactaaaggcataggtgcttcattacagcactataatccacttgttgatgagatgacttcaaatgaatttaatattcctaaaagttggaaacttattgctcaaatgccatttggtgatattcgtgaagctgctggcgaaaaatcatttaatccagtggaagatcgtttcgtaataaaaaaataatcaatatattgtagggaatgggacagaaatgataaagaatcattaattattcattatgtagtggttcatacacattagctgctgctaatgtgtacttatgaataggaatacatgagtaaaactcatgtataagaaatactaatttctaaagaaaaagtatttctttacgttagagcccaccccaacttgcattgtctgtagaaattggtgttccaatttctctatgttggggccccatcaactactgtcaatataatattgtcgagcctaggactttgattttatgtcctgggctcgttttttgcgtttcaacataacttttagtaagttatatataagatctatcaaggatgtgatgttatgaaagtccaaatttatcaattaccgattatttttggagatagttctaaaaatgaaactcaaataacgcaatggttcgaaaaaaatatgaatgatgaagtagatgtagtcgttttacctgaaatgtggaataatggctatgatttagagcatttaaatgaaaaagcagataataatctaggacaaagtttttcatttattaaacatttagctgaaaaatataaagtcgatatcgtagctgggtcagtttctaacattagaaacaatcaaatatttaatacagcttttagtgtgaataaaagtggccagctgattaatgaatacgacaaagttcatttagttcctatgttaagagagcatgaatttttaaccgctggcgaaaatgtagctgaaccctttcaattgtctgacggtacttatgtgacccaacttatctgttatgatttacgttttccagaattattaagatatcctgctcgtagtggtgctaaaattgcattttatgtggcacaatggcctatgtcacgtcttcaacattggcattcattactaaaggcacgtgcaattgaaaataatatgtttgtcattggaactaatagcactggattcgatggtaacacagaatatgctggccattcgatagttataaacccaaatggagatttagttggagaattaaatgaatccgcagatattttgactgtagatttaaacttaaatgaagtagaacagcaacgcgaaaatatacctgtatttaaaagtattaaattagatttgtataaataagaagcgcccgaaataataattaacacatgtcatgactaaacatagatttatgagagatttttcataagtctatgtttattttttaaaatagataactcagtaagaatccatttcgctctttgcaaatgaatgatttcttaattatattgattatttttttgaccttttccaacattagaattattcataaattttaacggtggatctcataatgaggattaactcttcccttctttattacaataaaaaaaggccgcgagcttgggaggggctcacgaccatacttattattaagggaatgttttacagttattttttcaatctatttttggggatgttattaattatgaaaaaaattttatttatcaaataatgataaatcgatgttgtttacgatagcttacatgctagaaataattatctgtaatgataattaagaaaaatacatagcactgagtccaaggaaactaactctactagcaaatgttactcacttgctaattttacatggttattaagttgggatggcttaataactcatacttttagtactatacgaagataacaaatttacaatgaaagtaattaattattcatcttattttttagtgaatttgttcactgtgtcgataatccattttactaagtcactgattgttgaaatgatatcttgtgccattgaaatcactccttccttaattaagataaaaattcttaaaattaaacaactcatcaactattttccatcacatctctgtgatctagttatattaaaacatgctaaaagcatttattttccattttttcttaactagtcgttttttattcttaactgtaaatttttttatgttaaaatattaaatacaaattacatttaacagttaagtatttatttcctacagttaggcaatataatgataaaagattgtactaaatcgtataatgacagtgaggagagtggtgtaaaattgaattattttgataataaaattgaccagtttgccacgtatcttcaaaagagaaataacttagatcatattcaatttttgcaagtacgtttagggatgcaggtcttagctgtaaatataggtaaattaattgttatgtatactattgcctatattttaaacatttttctgtttacgttaattacgaatttaacattttacttaataagaagacatgcacatggtgcacatgcaccttcttcattttggtgttatgtggaaagtatttttttattcacactcttgcctttaatattagtaaactatcatattaactttttaattatgactattatgacagttatcgccataggtatgataattagatatgctcctgcagcaactaaaaagaagcctattcctgtgcgacttattaagcggaaacgaaattatgcgattattgttagtctaatctttttcattatcacacttatcatcaaagaaccatttgctcaattcattcaattaggcatcataatagaagctattacattattacctattttctttgttaggaggacttaaaatgaatacattattaaacatcttttttgattttataactggtgttttaaaaaacattggtaacgttgcttcttatagtacatgttatttcataatggacgaagttgaaatacctaaagaattaactcaattacacgaataatataaacagaaagtgtgatagtaagtggaatcattaaatagttataattttgttttattcgtattaactcaaataatactaatgtttacagtaccatcaattattagtggtatcaaatacagtaaatctgactatttgtatatcacgggtattacggcattatcgttaattctatttaattttatcgatagcgtaaccttaataatactaactatattcataattatattatatttcagcaaaatcaaatggtattcaattttgctgataatgacctcgcagattattttatactgtgcaaattacatgtatatagttatattcacatatattgtcaaaatcgttgatagtatatttgtaatatttcccatcttctttgtagtttatgtgacaatcagtatactattttcttatataataaatagagttctcaaaaagattagctcatcatatctaatactaaacaaaggttttttaatagttatttcaaccattctactgcttactttttcattgtttttcttttattctcaaataaactcggatgaagctaaagtaataaggcagtattcttttatttttattggaatcactatatttttaagtatattaacatttgttatttcacaatttctccttaaagagatgaaatacaaaagaaatcaagaagaaattgagacctattacgaatacacattaaagattgaagcaattaataatgaaatgcgcaagttccgacatgattatgtcaatatcttaacgacactttcagaatacattcgagaagatgacatgcctggtctacgtgactatttcaataaaaatatagtgccaatgaaagataacttacaaatgaacgctattaagttaaatggtattgagaatcttaaagtacgtgaaattaaaggcttaatcactgctaaaattttacgtgcacaagaaatgagtataccgattagtattgaaataccagatgaagtaactcacattaatttgaatatgattgatttaagtcgcagtattggtattattcttgataacgcaatagaggcatcaactgaaattgatgatcctatcattcgagttgcatttattgaaagcgaaaattcagtaacgtttattgttatgaataaatgtgcagatgatataccacgtattcatgaattattccaagaaagtttttctactaaaggtgaaggtcgtggtttaggtctatcagctttaaaagaaattgctgataatgcagacaatgtcttattagatacaattatcgagaatggtttctttattcaaaaggttgaaattattaacaactagccataaggatgtgaatgtatgaaaattttcatttgcgaagacgatccaaaacaaagagaaaacatggttaccattattaaaaattatataatgatagaagaaaagcctatggaaattgccctcgcaactgataatccttatgaggtgcttgagcaagctaaaaatatgaatgacataggctgttactttttagatattcaactttcaactgatattaatggtatcaaattaggcagtgaaattcgtaagcatgatccagttggtaacattatatttgttacgagtcacagtgaacttacctatttaacgtttgtctacaaagttgcagcgatggattttatttttaaagatgatccagctgaattaagaactcgaattatagactgtttagaaactgcacatacacgcttacaattgttgtctaaagataatagcgttgaaacgattgaattaaaacgtggcagtaattcagtgtatgttcaatatgatgatattatgttttttgaatcatcaacaaaatctcacagactcattgcccatttagataaccgtcaaattgaattttatggtaatttaaaagaactgagtcaattagatgatcgtttctttagatgtcataatagctttgtcgtcaatcgccataatattgaatctatagattcgaaagagcgaattgtctattttaaaaataaagaacactgctatgcatcggtgagaaacgttaaaaaaatataataagataataaagtcagttaacggcgtattcaattgtaaatcttgttggattttaacaagataactagcaaatgcactgtatagctggctttttaattttaataacaaaattaaatatgacgcgtgaattaaaaaatgatgtaacgtttctttgtatacctattcctattactacataatttatcaatttctatttcactctacaatcctatggcgcaatttttaacaaaatgtactaaatttgaaatcgacagtttccttaaataaaatgctacaatttcctaccccgtgaatcttattttgttttaaaaaacagtgtagcacaagattcaacttgtttcctacactgttttataaatgaattatttaaaatgcttgttcaacctcttgtaatgttggcaaactattaatagcaccatactttgttgtcactattgcagcaacgcgattgctaaacgctaaaatttcctcaccttcattttcaaataactgagttaaatttaacacatcggttgctaaaatcctgctaataactgcaccaataaaggcatcccctgccccagttgtatcaacaggttttaccttatagccactatgataatgattaataccatttttcaaatatacggcagcaccatctgctcccttcgtataaatgactacagtgacattacctgtaaataatgattgaatggcttcattttcatcatgaatacctgtaataaattctaattcttcatctgaaacttttacaatatgcgccaatggcaaaaaggtatgaatagtttgtcttaaatcttcagcgttatcccataatggcaatcttacattaggatcaaatacgacagtaccatttgcatttaatgttttggtaatcaattgataatgtgcatctctcatcggactatcgaccaaatcaacagaacaaaaatgtactatatcgttttcattcacatcaatatcattcacaaaacttgattcaaataacatatcagcagagggcttacgataaaaagaaaaatctcgctcgcccgcttcagtcaaactcacaaaagctaacgcagtgtttgcttcattcgtgcgatacacttttgatacatctacaccaatacttgatatcgtttcaataatgctatctccaaatgcatcattacctaattgtgtaatcatattcgcttgttgtcctaacttttgaactgtacaagctacattacaaggtgcgccaccaatttgcttcgtaaatgtttgaacatcttttaaattcgcatttgtaatatttggaataaaatcaattaacgcttctcctattgaaaatagacgtctcatttatgttcatcctttaaatcgtatttagtaaattgtaaatatacttgccctgattctgttgatgttttaatacctagtgcgtcttctgtcgggaaaattcgagatgtcaaaacacgttccccatcattacagaaaatttctatactagatgtatcaacaaaaatttgtaattgctttaatggcgtgtctaatattgtactacgcgtcgtaccttcaacatttgtcggcaataaaccactgtcgctgcgatctaatgttattttattttcacgcttgttataagcgattaatgttgaagaagtcttagacgtacgtaattcaaagtacacttcggtagcatcattatccaaaatatctatgattaattcatactgtttaccttcatacggatgtaattttcgagtaaatttatttgcgtagcctaatgctgtctctttattgtgacgtaatttttccaacgctggatatggacgttgcttaagttgaccattttctacatttaatacacgaggaattgttaagcaatgggcccatccttcattatcagtaggatattcgatttccggtaaccccatccatccaattagtactcgtcggcctttttcatctaaaaatgtttgaggtgcatagaaatcaaagccattatcaagttcgacaaaattttcatgttcatatgttaacttttcaatatcaaactttccaagtatataaccactttgataaatatttttgaactgatcgccttttggttcaataccttgtggacaaataagtatgacatcttgattatctacatgaaagtaatctgggcattcccacatatatccaaaatcatccaactctgtatttatttcacctaaataatgccaattaattatatcttcagtattataaagtaataatcgaccttgctgatcattattttgtgcgccaatgatcgcataatatttctcaccatatttaaaaactttaggatctctaaaatgactcgtatatccttctggttgctggctaattactggctttggaaacttttcaactgaaccgtcttctttcagtcgtgcgatcatctgactcgcatgtcgttgccaatgattatctcgatgatttcctgtgtacatataatataaatgcccgttatattcaaaagcgctaccgctatatacaccatggctgtcatatttagtatctggatttaaaattggcccttcagctttaaagtttattaagtcatcactcgtgtagttataccaatactttaagccatgtactgcgcctaatgggaaccattgatgtgaaacataatacttccctttataaaaaataagtccgttgggatcatttaataagcctgtttctggttgtatatgaaattgttgacgaaattttgattgatcaacttgttgttttaatgttttaaaatactcagtatcaacgtcctcgattcgttgataacgttcttctctagtccattcggtcataatatttacccagtcctccttttataatttatgctgttaacaatttatattctattatagcaaattttacctacgttctttaacttttaacctatccatttatagttatatggtatcggttccacatttattttaaaaaatacagcgtctaaatattaacatctactgtgacgctatatggcatatcttgctttttaagcatctgttgtatctcttccatcgcgcattggccagcttcaaaataattataatgaattgtttttatcgatggagacactaattgtgtcattgggtcaccaccaaaaccatatatttgatgtggtttcataacatcttttttatcagaataatatttataggcagctaatgcaatcgtatcagttgctccaacaaccgcatctacttgctccacattttccaaaacatttgcaacatctttttgtgcttccacataagtaaaatttgtttcatgtatattaggtttaatttgaaatttggctaactggtcaagtaaaccacgttttctatgtataccaactgcaatatctttttcactcacactaaacacttcaatttgttgatatccctgttgaccaatccattcacctataatttgacctgctttataatcatcatgcacaatactatgaagttgttcatgttgttgaccaacaataacgattggtacattcattttattaatgacttctatatgtctctctgttatgtctgtagccattaaaacaataccatctactttactgcgtgctaatgtttcaagcgcttgtatttctgcttcgatatttaatcctgtgtaatttaaaattaattgtgattcatatttttggcattgttttgccaatcctttgattgtttcatctactgcatatgaattcattctaggtataatggcaccaataaggtgtgtttgtctcgctcttaaactttgagcaaattgattcggttgatagtcatgttctgctataatttttgttaatttttcacttgtttttttactgacagatccattatttaaaaatctagatactgtactttttgaaacgcctgccaatttggcaatatcagatatatttttcatacttattcacctatcattatttgtgacacttagccttattttagcatatgtgtaaccgctttaaataatatttctgcttctttcataaaaagatttcaaaataaaatttctgtataacaaaatgtcccaacatcaacctttagttaaatgtcaggacaatgaatattctatgtatatattttctaatatcgaatatgtttattgaatctatttagctcaccttcaaagtaagcatgttcaccgtgaacaatcttgtctaatcctatattcgtttcttgttccgtaacagataatggtgtaattaatttaattactttcgcaataataaacgtcatgacgatactaaaaattacaactgctgttacacataatatttgtacaagtataatatgtatgtcaccagtataaataaaaccattctcaatgtcaggatttgcctttttactttggaaaaaggctgttaatactgcaccaataataccaccaacaccatgaataccaaatgcatctaatgcatcatgatattttagttttaccttgatgtaattaataacgatatagcaacagataccgccgatcattgccatgattgttgcactaagatatgtcacgtatcctgctgcaggtgtaatgacaactaaaccagctaatgcacctagtaataaccctagtaaacttgtagtctttttaaaaatatattctagaattaaccaacctatagcacctgcactggctgaaatgacagtatttgtaaatgcaagcatcgcaatattatcaaatgtaaaagcactacctacattaaatccataccaaccaatccacacaaatataccgccaatcaacgtaatgataagattatgtggtgttgattcagaatgtttgtttccttttccaatcataatagctaatactaaaccagaaacacctgatgtaatatgaacaacagtacctccggcgaaatctaatacaccgagtttgttaatccaaccgccgccccaaacccaatgtgctactggactgtatacaagagcagtccatattactacgaataataaataaggaataaacttcattttctcagcgattgaaccagataaaatagaaattgcaatcgtacaaaacatcatttgaaataacataaacaaagcgaaaggaatatgtgggctaatatcttcttgagtcgcaaaacctacatgattaagaaaagtatattcccaatttccgaaccataaattcccattcccaaaactaattgtaaaaccaactgttatccatacaaatgtaacaagcacaattgctgccatactttgcatgacagtatttagcgcatttttagattgaactaacccgccataaaataaacttaatcctggtgtcattagccaaactaataatgtacacaaaaacataaatatcgtatcgttaagattcatacttaccactcccttgttttcataataatctgacaatttataaaaagcaaaaatgcgtaaagttttattacatcttttggaataaaatgtatcacgctatataaaattaatttcgtgaactaaaaccaaaaaagactacttactcgcttttaaagtagcggaagtagccatagaatctaatatctattttattattaaaatgataacgttaaactttttgaattgtaatcgtccatgaagcattatcaatttgttcatagtttgttacaggatatccattttctgcagcccaatttggaatagcttccgtcgcttgtgtacaatcaaaatcaatttttaattcatctccagatttcaatgttgccattttcttttgcgcttcaattaacggaaatggacataccattcctactgtacctaattcgtgtatcataattatttctccttttccaatcacttttatttgatcaacatcatttgcataataatcttctatactatttgcgtttgctgttggacctttgcagattgttgttgtacttttttcattggacgaacaaagataaaatgactcattgtccataccccaactatcatcgatgttagcgcaattcatccttgccaagtcatcgttgccgtttcaaccaaaccgttaccgatagaacaaccaccagcaactgacgcaccaaatcccatacatatgccaccaatagcactgtttcgtattgtaatcttgtctggcaatcgccatttaaattctcttgatcctctagctgcaatatatgaaccgatgaaaattcctagaactaaaaagacaccccaatcaataaatttagtttcacctgtaatcaaaaagtgtactaaatttgctgatggcgttgttatacctaaaccgtcatttcttccagttgatgcactcattggccaagctaagagtgcgataagtccaattgcaattgctgcaataaatggatggtatcgtttttcgaaaaggtaatatctaatacctgtataacgttgctttagttttggaacagcaactcgaactttcttattattgagtgttcttacaactagaaaaatggtgattatagttaatataacgactaatccccaaaacggaatgcccgttgtttgagacatatcactatttacattcgttggttgattaattttatccattactggctttaaaatccctgttttagtgattgctgcagtaacagcatataatactaatgcaatccaactaccaattagcccttcaccagcgcgataccaagtacctgttgcacatcctccagccaatactattccaattccaaaaataaaagaacctataactgttcccaatattggaaaactatgtgcaggaatttgtaaaatacctgttgtcgtcaaaatcaataatcctatactttgaatagtaatagcgattaataatgcatagaacatcttattattcttttgcacatacatatctcgaaagccacctgttaaacaaaatcttgttctttgcatcacaaaacctaagagtcccccgacaattaagccactaaaaatcatccacatcgtcctaaccccctaatttccgataagtttcgtatgtattataggcgatgattttcttgttttcaaccttatacacaatatttttgatatttatattatattcacataagaaatgcgattaattacgattcatcattatatctctacgtgttaatttattaacctatactatatttatcaacacaacagtttttcctttcattttcaaacataacagaaaaagcctgagacatacttagtcccagactgttctataattaattaaagatataacaaggttaatcattcaaagctaacatcacatttattcactgtaatttttcataaagaataataatgactgtaattctatacctaagtcaatttgatgtacttgcacatctgaaggcgtattaattctaccaggagtgaagtttaaaatacctttcacaccagcttggacgagttcatctgcaactttctgtgcaactctttctggtgtagttagaatcacaacatctatttcttccttcttcaatgttgttattaattcatcgttatcttttacaataacgttccctattttctggccaataacatcttctttaacgtcaaacgcttctgtaatcgtcatatcgtcatgtattgaaaagttatatgtgagcagagctttccctaggttcccaactccgacaattgcgattttgatcatgtcactctcgcttagttcagatttaaagaaatccaataaactatctatattatatccgtacccttttttacctaattcgccaaaatatgaaaagtcacgacgaattgttgccgagtcaatttgtaacgcatcgctaatcgcttttgaatttacacgatctatacctttagattttaatgaactgacaaatctataatataacggcaaacgttttaaagttgctcgaggaattttaacttggtcactcattcgctatttcctccttcgtgtttgaatgaattatatctatgtattcaaacgagttagagcgtaattgttagattattaaaaaacaaataattgattacaatgaatacctaaatattatacattattgaattttaaaaataaatatcttagtttcaagacggcgttttatactgtaaaatggttattaatgtaataattacgacttttatcataagttaataaaatttgcgaaagacgaaaggtgaagatcgaatgatacttttacaactcaatcatatatcaaaatcgttcgatggtgaagatatatttactgatgttgattttgaagtaaaaactggtgaacgaattggtatcgtaggaagaaatggcgccggtaaatcaacattgatgaaaattatagctggcgtagaaaactatgattctggaaatgtgtcaaaaattaaaaacttaaaactaggttatttaactcaacaaatgactttaaattctaatgcaacagtttttgaagaaatgtcaaaaccatttgaacatattaaacgaatggaaagcttaatcaaagaagaaacagattggttatcaaagcatgcaaatgattacgatagtgatacatataaaacacatatgtcccgttatgaatctttatcgaatcaatttgaacaattagaaggatatcaatatgaaagtaaaattaaaacagtacttcacgggttaaattttagtgaagaagatttcaataaacctatcaatgattttagcggtggccaaaaaacacgtttatctttagctcaaatgctattaaacgaacctgatttattacttttagatgaacctactaaccacttagatttagaaacgacaaagtggcttgaagattatctacgttattttaaaggtgcaatcgtcatcatcagccatgatcgttactttttagataaaatagttactcaaatttatgatgtggctttaggtgatgtcaaacgctatgttggtaattacgaggaatttatacagcaacgggatttatattatcaaaaacgaatgcaagaatatgaaagtcaacaagcagaaataaaacgattagaaacttttgttgagaaaaatattacccgtgcttcaacaagtggaatggcaaaaagtagacgtaagattttagaaaaaatggaacgcattgataaaccaatgttagatgccaaaagtgcaaatattcaatttggttttgaccggaatacaggtaatgatgtcatgcatgtaaaaaatttagaaatcggttatcaaactgcaattaccaaacctatcagtatagaggtctctaaaggcgatcatatagcaatcattgggccaaatggtattggaaaatcgaccttaattaaaactattgctaatcaacaaaaagcacttaatggcgatattactttcggcgcaaatttacaaattggttattatgatcaaaagcaagcagaatttaaatctagtaaaacgattttagattatgtgtgggatcaatatccgttaatgaatgaaaaagatattcgtgcagttcttggacgtttcttatttgtacaagacgatgttaaaaagataattaatgatttatctggtggtgaaaaagcacgtttacaactagcactacttatgttgcagcgtgacaatgtacttattttagatgaacctaccaaccacctcgatatagattcaaaagaaatgttagagcaagcgctccaacattttgaaggaacaatactatttgtttcccatgatcgttactttattaaccaattagcaaacaaggtatttgatttaacaattgatggcggaaagatgtatttaggagattatcaatattacattgaaaaagttgaggaagcggaagcgttgaaagcgcaccaagaagaacagtcagttaacgtacaagcacatgaaaagtctatggaacaatcgtcgtatcataaccaaaaagaacaaagacgtgaacaacgtaaacttgaacgacaaatatccgagtgtgaaaatgaaatagaaactttagagactactatcttacaaatagacgagcaattaacccaaccagaagtttatagcaatccacaaaaagcaaacgaattagctatccaaaaacaagatagcgaacaaaaattagaacacgctatgtctaaatgggaagaattacaacaaaaactataaaaatatacataactctaactgtaaaatcgctatagttagagttatttttttacaaattttaaatttttttattcacaataaaaacgctgatattatagctatccacagacttatcctagttatccacaagtaaattaacactaatcaattatttattttctgttttcccacctgatatccacaataaatgacgttatcaacaccttttatccacaagttattcactctttgttgataagtacgcatgttctctattgacattgtttttatcaaaattcattgttaatacattttctttatgaaataataatcacaataatattgaagtatatttttattattattcaaaataaataaggagatagttatgagcacaaatcaaacatttttaatatttgttatagcaattattctacttacatctgtaataggaattgttggacgatacatgagtcgtcaacgtctattaaaatcaatggaaacattatggcaaacgatttctccattagagtcttttatcagaccgaactcacatttcgactatgagtataagctctacaaggataaatttgaatcacattcattagttgatgataaaacttggtccgatttaaatatgaatgcaatctttcataagatgaattataatttaacagctattggtgaaatgaaactatatgcctgtttacgtggaatgctttcaatttcgaacaaatcattacttagtttatttaatgataatgctgaatttagaaaaaacgtaacatatcatttagctttgataggtaaaactgtttatccaacatttccagaccaaatcacaccggtaaaacatcaaaatatattgtttctatgcccgtttttaccagttatctcatttgcggttatatttattaattcacaagttggtattttattatttcttatgagttgcctatttaatatcattttatctgcaactttaaagcgtacatatgaggatgacttaaagtctatcttttatgcatccaatgttttaaaacaaggctatactatctcaaaaattagacatgctccacaacccgaagtcaattttaagcaatttagaacagcacgtcatttaacgagtgttttagctgaagttaatgatgaagatatcggagctatggtaattaaactagttaaacttattttcatgcttgattatgttttattccattcaattcaaaaaagttatacaacacatatgaatgagctaaaaaattgtttcgattacatagctgaattagataatcattatgcattagcaatgtatcgtagaacgctagaatgctatactaaaccacaaattgatgattcaaatgatggcatagtattctctgagttaacacatccactcatagctgatgcagtagccaatgatttctcactatcacaaaatatactgttaactgggtctaatgcttcgggtaaatcaacatttatgaaatccatagcaataaacattattcttgcatcggctatacaaacagttaccgcaagcaaatttgtatatcaacctggaattgtgttcacgtcaatggcaaatgccgatgatgtgttatcaggcgatagttattttatggctgaattaaaatctattaagcgtattgttgaaattccagataatcaaaaaatatactgctttatagatgaaatttttaaaggtaccaacacaactgaacgaattgccgcttcagaatcagtactatcatttttacatgaaaaatctaactttagagttattgcagcaacacatgatattgaattagctgaactcttaaaacaacgttatgaaaattatcatttcaatgaggtaatagaaaataataacatacattttgattacaaaattaagcctggcaaagcaaatacacgtaatgccatcgaattattaaaaatcacttcatttccagcaaaaatatatgaacgagcaaaagataatgtttccaatggttagcatgaatcttgaacatcaatcaatgttcaagtcgcaacattgttatattggcagtctttgactaaatgaaaatgcgcttgtaataagttttttcaatactagtccggggccccaacatagagaaattggaacaccaatttctacagacaatggaagttggggtgggccccaacacagagaatttcgaaatgaaattctacaggcaatgcgagttggggttggacgacgaaataaattttgcgaaaatatcttttctgtctcactcccctaattgcaatataaaaacgtcagctatcacatgacaaaagacaatgaacagtttcaataatgttcatcgtaatcatgttaataactgacgtttattttattctgcagaatactcttctaaatctatattgctgtgcccatttaatgctaaatcagcaaatcgaccttgctgatacaaatagtggccggcaacgcctatcattgcagcattatctgtgcataatttagggctagggatagttaattgaatgtcattgattttgcattgatccgctaaagattgacgtaatcctttattactcgccacgccaccagcaacaattaatcgctgaacaccatattctttacaagcttgaatagctttaaacgtaagcacctctacaacactattttgaaagctcgttgctacgttagcttcaatgattggaatatttttttgtcgttgattgtgaagttgattgattacggcacttttcaacccactaaaactaaaatcataactatctttatccaaccaaacacgagggaatgaataagtatcttcaccttcagcagccaaccgatcaacttgtggaccacctggataatttaaaccaattgttcttgccactttatcataagcctcacctactgcgtcatctcgtgtttcaccaatgacttcaaatgttaaatgatctttcatataaactaattcagtatgcccacctgaaacaataagtgcaattagcgggaatgttaatggctcttctatgtgattagcatatatatgtcctgcaatatgatgaactggaataagtggcttatcgtaagcaaatgccaatgctttggctgcattaacacctattagtaacgcaccaattagtccagggccttctgtaaccgctatggcatcaatatcttccattgatacatcggcatccactagagcctcgtttattgttgttgttataccttcaacgtgatgtctacttgccacttcgggaacgacaccgccaaatcgtttatgactttcaatctgacttaaaactgtatttgataaaatatctctgccattttttataacactaacgcttgtttcatcacaacttgtttcaacagctagtattaatatatctttagtcatttaaattcacccacataaccattgcgtcctcaccttcaccataataatttttacgtttaccaccatattggaatcctaaattttcatatacatgttgtgccactttattattaactcttacttctaaactcatcacatcacaagtgtgacttgcatagtttattccgtattttaaaagcatttgacctaaaccatagcctctataattatcatcgattgcaactgtcgtaatttgagcttgatcgataacaatccataaacctaaataaccaataatttgttgttcaaattctaagacaaaatatttcgcaaagttattttgctctatttcatgataaaatgcgtcaattgtccaagaactatcattgaaactccgacgctcaatatcaaagacttgtggcacatcttctttggtcatctctctaatgtttaattgttcttttgactgttgatccaatttcgttccgcctcagctaatttatggtatttaggagtaaatgtatgtacgtctgaaggtttatctatcaattgatacatgactgatgcatttggtagctgcgcaatcacatcaccttgtaattcatcttgtaattttacagtatcttttccaatataaataaatggttggtttaaatcttctaaaaaagctcgcaatgcttctatcgacatatattgatcttctaaaatagtcactaattgaccattttgccactggaatatgcctgtataaactgcttgtcgtcttgcatcaaacacaggaaccaataatttatcagtatgatcgattgttgctgccaatgcctttaatgatgaaacaccatataatttaacatctaacgcatacgctaatgttttagcaacagtaacaccgatacgtaagccagtatatgaaccaggaccttcagcaacaataatcgcatctaattgctgtttagctattttgctctgctcaaatagctgactaatcgcaggcattaattgcactgaatgattttgtttagaatccgtagttatttcagctaaaacttcatcgttttgcatcaatgctactgataatggttgattcgatgtatcaatgagcagcgaattcatggataattgcctccttaatttgttcataatgttctccttgcgcgaacaactcaatttgtcttgaattttcagatattgttgaaatgttaatagataaatgcgtcgctggaagtaaatcttttataaattgactccattcaataacagtaattgcctgatcttcgaaaaattcatcaaaccctaaatcttcatcagaatcttctaagcgataacaatccatatgatgcaattttaaatttttacccctatatgatttaatgatgttaaatgtcggggaattaatcgtacgtcttacaccaagagcttttcctataaattgcgttaacgttgttttacctgctcctaaatctccgttaagtaaaatcaaatcaccacttttcaattgctcaactaaaaacatagcaaaatgattcatttcatctaaattatttatctttatcaatgttgattctcctatattatgcttttcattcataaaaatgattatccattgttcaatcgtatctaactttatatttaacctttatattgtaacaaatttcaacttaaatttcttatctttgaaacagattatctcttcaaagttaattgtaagaaaatttaaaatatttgttgacatactaaagcagatatagtaaattaaatttatcaaatttttagacaattctaactattaaagtgatatataccattcacggaaggagtataataaaatgcttaatcaatatactgaacatcaaccgacaacttcaaatattattattttattatactctttaggactcgaacgttagtaaatatttactaaacgctttaagtcctatttctgtttgaatgggacttgtaaacgtcccaataatattgggacgtttttttatgttttatctttcaattacttatttttattactataaaacatgattaatcattaaaatttacgggggaatttactatgcgaagcgacatgatcaaaaaaggagatcaccaagcaccagcaagaagtcttttacatgccacgggcgcgctaaaaagtccaactgatatgaacaaaccatttgtagctatttgtaactcttatattgatattgttcctggacatgttcacttgagagagcttgcagatatagctaaagaagcaattagagaagccggtgccattccatttgaattcaatacaattggtgttgatgatggaatagctatgggacatatcggaatgcgatattctctaccatcacgtgaaattattgcagatgcagctgaaactgtaattaacgctcattggtttgacggcgtattttacattcctaattgtgacaagatcacacccggtatgattttagcagccatgaggacaaacgtaccagctatcttttgctctggtggaccaatgaaagctggcttatctgcacatggtaaagcattaacactttcatcaatgtttgaagctgtaggtgcttttaaagaaggatcgatttctaaagaagaatttttagatatggaacagaatgcctgccctacttgtggttcatgtgctgggatgtttactgcaaattcaatgaactgtttgatggaagttttaggtctagcattaccatacaacggtactgcacttgcagtcagtgatcagcgacgcgaaatgattcgccaagcagcttttaaattagttgaaaatattaaaaatgatttaaaaccacgtgatatcgttactcgcgaagcaattgatgatgcatttgcacttgatatggctatgggtggttcaacaaacacagtactgcatacgttagccattgccaatgaagctggcattgattatgacttagagcgtataaatgctattgccaaacgcacgccatatttatcaaaaatagcacctagttcatcgtattcaatgcatgatgtgcatgaagctggtggcgtcccagcaattattaatgaattgatgaagaaagatggcacgttacacccagatagaatcacagttactggcaaaacattacgtgaaaataacgaaggcaaagaaattaagaactttgatgtcattcaccctcttgatgcaccatatgatgcacaaggtggtttatctatcttatttggtaatatcgcccctagaggcgcagttattaaagttggcggcgttgatccatctatcaaaacatttactgggaaagcaatttgtttcaattcgcatgatgaagctgttgaagcaatagacaatcgtaccgttcgtgcaggccacgtcgttgtcattagatatgaaggacctaaaggtggaccaggtatgcctgaaatgttagcacctacttcctctattgttggtcgtggcttaggtaaagatgttgcattaattactgatggtcgtttttccggtgccacaagaggtattgcagttggtcatatttcccctgaagctgcatctggtggaccaattgccttaattgaagatggagatgagattactattgacttaacaaatcgtacattaaacgtaaaccagcctgaagatgttctggcgcgtcgccgagaatctttaacaccatttaaagcgaaagtaaaaacaggttatctagctcgttatactgccctagtaactagcgcaaatacaggtggcgtcatgcaagtgcctgagaatttaatttaatttatttttatattggagatggttaaaatgtctaaaactcaacatgaagtaaaccaaaatattgaccctttaaaaatggctgaatcacttgaacctgaacaactaaatgaaaaaacttcaaatgacatgcgttcaggatcagaagtgctagtagaagctctacttaaagaaaatgtggattatttattcggttatcctggtggtgccgtactacctttatacgacacattttatgatggtaaaatcaaacatattttagcaagacacgaacaaggtgctgttcatgctgcagaaggttatgcacgtgtatctggtaaaactggcgtcgttgtagttacaagcggtccaggtgcaacaaatgtaatgacaggtattacggatgcacattgcgactctttacctctagttgtattcaccggacaagttgctacaccaggtattggtaaagatgcattccaagaagcggatattctatctatgacttcaccaattacaaaacaaaattatcaagtgaaacgtgttgaagatatccctaaaatcgtacacgaagctttccatgtagctaattctggacgcaaaggtcctgtagtgattgattttccaaaagatatgggagttttagctacaaatgtggatttatgcgacgaaatcaatattccaggttatgaagttgttacagaaccagaaaataaagacattgacactttcatctcacttttaaaagaagcgaaaaagcctgtcgtattagccggcgcaggtattaatcaatcaaaatcaaatcaattattaacacagtttgttaataaacatcaaatcccaacagttactactttactaggtctaggtgcagtaccttatgaggatacactatttttaggtatgggaggtatgcatggttcttatgctagtaacatggcattaactgagtgtgatttactcattaatttaggtagccgcttcgatgatagattagcaagcaaaccagatgcctttgcacctaacgccaaaattgtacatgtagatattgatccttcagaaatcaataaagttattcatgtagatttaggtattattgcagactgtaaacgatttttagaatgtttaaatgataaaaatgttgagactattgaacacagtgactgggttaaacattgtcaaaataataagcagaaacacccgtttaaacttggcgaagaagatcaagtattttgtaagccacaacaaacaatcgaatatatcggcaaaattacaaatggtgaagcaattgttactacagacgtgggacaacatcaaatgtgggcagctcaattttatccatttaaaaatcacggacaatgggttacaagcggtggtttaggaacaatgggattcggtattccttcgtcaattggtgccaaattagctaatcctgataaaacagtcgtatgtttcgttggtgacggtggtttccaaatgacaaaccaagaaatggcactattacccgaatatggtttagatgtcaaaatcgtactaatcaataatggaacattaggtatggttaaacaatggcaagataagttctttaatcaacgcttctcacactcagtatttaatggtcaacctgattttatgaaaatggcagaagcatatggcgtcaaaggtttcttaatcgataagccagaacaactggaagaacaattagatgcagcgtttgcttatcaaggaccagctttaattgaggttcgtatttcccctactgaagctgtaaatccaatggttccgagtggcaaatcaaatcatgaaatggagggcttataatgacaagaattcttaaattacaagttgcggatcaagtcagcacgctaaatcgaattacaagtgcttttgttcgcctacaatataatatcgatacattacatgttacacattctgaacaacccgggatttctaacatggaaattcaagtcgatattcaagatgatacatcacttcatattttaattaaaaaattaaaacaacaaattaatgttttaacggttgaatgctacgaccttgttgataacgaagcttaattttaagacaaaggcaatgatgcgctaattagttatagatatatcataggctgctagttaacatctgccactattacaaagttatatttcagaattttcgaaaaacaaaacttttaattatttggaggaatttattatgacaacagtttattatgatcaagatgtaaaaacggacgctttacaaggcaaaaaaattgcagtagtaggttatggatcacaaggccacgcgcatgcacaaaacttaaaagacaatggatatgatgtagtcatcggtattcgcccaggtcgttcttttgacaaagctaaagaagatggatttgatgtgttccctgttgcagaagcagttaagcaagctgatgtaattatggtgctattacctgatgaaattcaaggtgatgtatataaaaacgaaattgaaccaaatttagaaaaacataatgcgcttgcatttgctcatggctttaacattcattttggtgttattcaaccaccagctgatgttgatgtatttttagtagctcctaaaggaccggggcatttagttagacgtacatttgttgaaggttctgctgtaccatcactatttggtattcaacaagacgcttcaggtcaagcacgtaatattgctttaagttatgcaaaaggtattggtgcaactcgtgcaggtgttattgaaacaacatttaaagaagaaacagagacagatttatttggtgaacaagcagtactttgcggtggtgtatcgaaattaattcaaagtggctttgaaacattagtagaagcgggttatcaaccagaattagcttattttgaagtattacatgaaatgaaattaatcgttgatttgatgtatgaaggcggtatggaaaatgtacgttactcaatttcaaatactgctgaatttggtgactatgtttcaggaccacgtgttatcacaccagatgttaaagaaaatatgaaagctgtattaactgatatccaaaatggtaacttcagtaatcgctttatcgaagacaataaaaatggattcaaagaattttataaattacgcgaagaacaacatggtcatcaaattgaaaaagttggtcgtgaattacgcgaaatgatgccttttattaaatctaaaagcattgaaaaataagatagacctacaatgaggagttgttaaatatgagtagtcatattcaaatttttgatacgacactaagagacggtgaacaaacaccaggagtgaattttacttttgatgaacgcttgcgtattgcattgcaattagaaaaatggggtgtagatgttattgaagctggatttcctgcttcaagtacaggtagctttaaatctgttcaagcaattgcacaaacattaacaacaacggctgtatgtggtttagctagatgtaaaaaatctgacatcgatgctgtatatgaagcaacaaaagatgcagcgaagccggtcgtgcatgtttttatagcaacatcacctattcatcttgaacataaacttaaaatgtctcaagaagacgttttagcatctattaaagaacatgtcacatacgcgaaacaattatttgacgttgttcaattttcacctgaagatgcaacgcgtactgaattaccattcttagtgaaatgtgtacaaactgccgttgacgctggagctacagttattaatattcctgatacagtcggctacagttaccatgatgaatatgcacatattttcaaaaccttaacagaatctgtaacatcttcaaatgaaattatttatagtgctcattgccatgacgatttaggaatggctgtttcaaatagtttagctgcaattgaaggcggtgcgagacgaattgaaggcactgtaaatggtattggtgaacgagcaggtaatgcagcacttgaagaagtcgcgcttgcactatatgttcgaaatgatcattatggtgctcaaacagcccttaatctcgaagaaactaaaaaaacatcggatttaatttcaagatatgcaggtattcgagtgcctagaaataaagcaattgttggccaaaatgcatttagtcatgaatcaggtattcaccaagatggcgtattaaaacatcgtgaaacatatgaaattatgacacctcaacttgttggtgtaagcacgactgaacttccattaggaaaattatctggtaaacacgccttctcagagaagttaaaagcattaggttatgacattgataaagaagcacaaatagatttatttaaacaattcaaggccattgcggacaaaaagaaatctgtttcagatagagatattcatgcgattattcaaggttctgagcatgagcatcaagcactttataaattggaaacactgcaactacaatatgtctctagcggccttcaaagtgctgttgttgttgttaaagataaagagggtcatatttaccaggattcaagtattggtactggttcaatcgtagcaatttataatgcagttgatcgtattttccaaaaagaaacagaattaattgattatcgtattaattctgtcactgaaggtactgatgcccaagcagaagtacatgtaaatttattgattgaaggtaagactgtcaatggctttggtattgatcatgatattttacaagcctcttgtaaagcatacgtagaagcacatgctaaatttgcagctgaaaatgttgaaaaggtaggtaattaattatgacttataacattgttgccctacctggtgatggaatcggtccagaaattttgaacggatctctatcattgcttgaaattataagtaataaatataactttaattatcaaatagagcaccacgaatttggtggtgcctctattgatacattcggcgagcctttaactgagaaaacgttaaatgcgtgtaaaagagcagatgctattttactgggtgcaatcggtggacctaaatggacagatcctaacaatcgaccagaacaaggattattaaaattacgtaaatcattaaatttatttgcaaatatacgccccactaccgttgtcaaaggcgctagttctttatcacctttaaagcaagaacgcgttgaaggtacagatttagttatagtccgtgaattgacaagtggtatttattttggagaacctagacattttaataatcacgaggccttagattctcttacttatacaagagaagaaatagaacgcattgttcacgtagcatttaaattggccgcttcaagacgaggaaaactaacatcagttgatatagaaaatgtattagcttctagtaaattgtggcgcaaagtcgtaaatgaagtgagtcaattatatccagaagtaacagtaaatcacttacttgttgatgcttgtagtatgcatttaatcacaaatccaaaacaatttgacgtcatcgtttgtgaaaacttatttggtgatattttaagtgatgaagcttcagtgattcctggttcacttggtttatcaccttctgctagttttagtaacgatggtccaagattatatgagcctattcatggatcagcaccagatattgcaggtaaaaacgttgccaatccatttggaatgattctatctttagcgatgtgtttacgtgaaagcttaaatcaaccagatgctgcagatgaattagaacaacatatttataacatgattgaacatgggcaaacgacagcagatttaggcggcaaattgaatactactgatattttcgaaattctatctcaaaaattgaatcactaagggggagatgtaaatgggtcaaacattatttgacaaggtgtggaacagacatgtgttatacggaaaattgggcgaaccgcaactattatacattgatttacaccttatacatgaagttacttctcctcaagcatttgaaggacttaggcttcaaaacagaaaattaagacgcccagatttaacatttgcaacactcgatcacaatgttcctactattgatattttcaatattaaagatgaaattgcaaacaaacaaatcacaacattacaaaaaaacgccatagattttggggtgcatatttttgatatgggttctgatgaacaaggtattgttcacatggtaggacctgagacaggacttacacagcccggcaaaacaatcgtttgtggtgactctcacacagcaacacatggcgcatttggtgctattgcatttggaattggaacaagtgaagttgaacatgttttcgcaactcaaacgctatggcaaacaaaacccaaaaacttaaaaatcgatattaacggtaccttaccaacaggcgtctatgctaaggacattattctgcatttaattaaaacgtatggtgttgattttggtacaggctatgctttggaatttactggcgaaacaattaaaaacctttcaatggacggtcgaatgactatttgtaacatggctatcgaaggtggtgccaaatacggcataatccaacctgatgatataacatttgaatatgttaaagggagaccatttgccgataacttcgctaaatcagttgataagtggcgtgagctatattctgatgacgacgcgaaatttgatcgtgtaattgaacttgatgtttcaacattagaaccacaagtgacatggggaactaatcctgaaatgggtgttaatttcagtgaaccattccctgaaatcaatgatatcaacgatcaacgtgcgtatgattatatggggttagaaccaggacaaaaagctgaagatatcgatttagggtatgttttcctcggttcatgtacaaatgctagactatcagatttgattgaagctagtcatattgttaaaggaaataaagttcacccaaatattacagctattgtcgtaccaggttctcgtacagtaaaaaaagaagctgaaaaattaggtctagatactatttttaaaaatgcaggatttgaatggcgtgaaccaggatgttcaatgtgtttaggcatgaatcctgaccaagtacctgagggtgtacattgtgcatctacaagtaatcgaaacttcgaaggacgacaaggcaaaggtgctagaacacatttagtatcccctgctatggcagcagcagcagctattcatggtaaatttgtggacgtaagaaaggtggttgtttaaatggcagcaatcaaacctattacaacatataaaggtaaaatagtccctcttttcaacgacaatatcgatacagaccaaatcattcctaaggtacacttaaagcgtatttcaaaaagtggctttggtccatttgcttttgatgaatggcggtacttacctgatggttcagataatcctgatttcaatccaaataagcctcaatataaaggtgcatccatattaattactggagataatttcggatgtggttcaagtcgtgaacatgcagcttgggcacttaaggactatggctttcatattattattgcaggaagtttcagtgacattttttatatgaattgtacaaaaaatgcaatgttaccaattgttttagaaaaaaatgcacgtgaacatcttgcgaaatatgttgaaattgaggtcgatttaccaaatcaaactgtgtcatcaccagacaagagtttccattttgaaattgatgaaacttggaagaataaacttgtaaatggcttagatgacattgcaatcaccctacaatatgaatcattaatagaaaaatatgaaaaatcactttaagggagttgaatattatgacagtcaaaacaacagtttctacgaaagatatcgatgaagcatttttaagacttaaagatattgtcaaagaaacacctttacaattagatcattacttatctcaaaagtatgattgtaaagtttatttaaaacgagaagatttacaatgggtacgttcttttaaattaagaggtgcttacaacgctatttctgttttatcagatgaagctaaaagtaaaggtattacatgtgcgagtgcaggtaatcatgctcaaggtgttgcctatacagctaaaaaacttaatttaaacgctgttatctttatgccagtcactacacctttacaaaaggtaaatcaagtaaagttctttggaaatagtaacgttgaagttgtactcactggtgatacatttgatcactgtttagctgaagctttaatttatacaagtgaacatcaaatgaactttatagatccattcaataatgttcatacaatttctggacaaggtacgcttgctaaagaaatgctagaacaagcaaagtctgacaatgttaactttgattatctatttgccgcaattggtggtggcggtttaatttcaggtattagtacctattttaaatcctattctcccaacacaaaaattatcggagttgaaccttcaggtgctagtagtatgtatgaatctgttgtcgtaaataatcaggttatcacattacctaatatcgataaatttgtcgatggagcttctgtagccagagttggcgatattacttttgaaattgccaaaaaaaatgtagataactacgtacaagtagatgaaggtgctgtatgttcaacaattttggatatgtattcaaaacaagcaatagtagcagaacccgctggcgctttaagtgtaagtgcgcttgaaaactataaagattatattaaaggtaaaacagtggtttgtgtcattagtggtggtaataatgatattaatcgaatgaaagaaattgaagaacgttcattactatacgaagaaatgaagcattactttatcttaaatttccctcaacgtccaggtgcattgagagaatttgtaaatgacgtattaggacctcaagacgatattactaaatttgaatacttaaaaaaatcttctcaaaatacaggtactgtcattattggtattcaacttaaagatcatgatgatttaatacaactcaaacaacgtgtaaatcatttcgatccttccaatatttatattaatgaaaataagatgttatattcattgttaatttaacacatattaagaaaagcagtcataaattgatttctaattgaaatcatcttatgactgctttttattatgctttacattattgaggttgcacgctttgtataccatcgtatatttctttgagcctaaaatcttcttggaaatgataatttaataatgtacacttttgattgtttaaacatgtacaatttttaaaaacctatagataattttattgaggtgaacaacaatgaaattatctttagacataaatactgattttgaagttactactcttacagatttaccaaaattaaaaattgttatggagaacttaaacatgaaaataaacaaaagtgaaatagcgagacacatggatgttgatagaagaacagttgataaatatttaaatggctttgagccaaccaaaaagagaaatcgtcagtctattattgacaagtattaccctatcctagaaaaaattacgtttcagacactagtgaacaaaagttctactataagcttattctttggcaatatttgaaggataaacatgggttaacgtgtgcctattctacatttagagcttatatccttaaacatgatgagtttaatcgttattttatgaaaggttatcaacggatgtcgactaaaggcacaacgagattcgagacaaaagccggtcatcaagcacagtttgactggaaagaaggcattaactttaaaacgaaggataatcaaatcgtttcactaaatataggcgtactactacttccttattcccgttttgtaatcatgcaagtgacaatgaataaatcaagtgatgtcttatttaatttattgacacaagcgtttgagctaataggaggtgtacctaatgaacttgtaacggataacatgaaaacggtcatggatcaaccaagaacagaacgtacaaatggtcaaataaatcgtagatttaaacaattcattgatgattttaattttaaagtaaaaccttgtattgctggccgtcctagaacaaagggtaaagtagaatcgataatgaaaatattagatgaaattcatgcatatcaaggcgaattatatttggaagagattcctaagtttatttctaatcttaatgagcgactgaactactcatttcatacgagtacaggtaaaatacctattattgctttagaaaaagaaaaaagtttcttacaaccactaccgaatgtgaatgtaagaaactcatataaagtgaaacataaatatttgaaagtcaaccactctaatatgattacatataagtccaatcaatattcagtaccagctgaatattgtgggaaaatagttgaagttcaagtttatgatcaaaaactacacgtttattataacactaaatcgatttgtgaacatctcatcacacaacgtaaattaaattatcaaaaagaacattatttagaaacactgtcatcttcttttggaaatagagaaatggatgatattaatcagattacgatagataattttaatgcgattggaaagttgtatgatgaataattcgacgaattataagcgcttaaaagcgaatttagaatatttgaaaatgaatcaaatgattattcatcatgatgatgttatcgattttagtattaaaaacaacctgtcatttatagatacactaattaaattaagcgactacgaaatcgaaattaaagagaaaaatttgattgaatcgatggtaaaggtggcggcatttccgtttaaaaaagaaatatcagactttgactttaattttcaaccgagcatcaatcaacaagaaatttgggattttacagatttgcgttttatagaaaaatatcaaaacattgtctttttaggctcaagtggcgttggtaaaacacatttagctacaggcattggtatggctgcagctaaaaatagagtaagtacttactttattaaatgtcatcatttgatagagaatttaagaaaagcaaaacttgagaacagattagaaaatagattgaagcactatagcaagtataagttattaatcatagatgagattgggtacttacctattggaagtgaagatgccaaactattctttcaattaatagatttaagatatgagaagaaaagcacaatatttaccacaaatatcaatttcaacttatggaatgaaatatttgatgatcccaaaatcgcaaatgcgattttggataggatattgcatcattcaagtgtagttaaaatcactggcaaatcgtatagattaaaagatcattcgcctaagaaggaaattacttagcaaacaattttgtacattcttatacaatcatttatgtacatttttatattgacatttacatcttctttgcctttacttttttactttgctactttagacataaaaaaagagaccttgcggtctcaatgcggctcatcgcatccattttttgcctggcaacgttctactctagcggaacgtaagttcgactaccatcgacgctaaggagcttaacttctgtgttcggcatgggaacaggtgtgacctccttgctatagtcaccagacatatgaatgtagattatacattcaaaactagatagtaagtaaaagtgattttgcttcgcaaaacatttattttgattaagtcttcgatcgattagtattcgtcagctccacatgtcaccatgcttccacctcgaacctattaacctcatcatctttgagggatcttataaccgaagttgggaaatctcatcttgaggggggcttcatgcttagatgctttcagcacttatcccgtccacacatagctacccagctatgccgttggcacgacaactggtacaccagaggtatgtccatcccggtcctctcgtactaaggacagctcctctcaaatttcctacgcccacgacggatagggaccgaactgtctcacgacgttctgaacccagctcgcgtaccgctttaatgggcgaacagcccaacccttgggaccgactacagccccaggatgcgatgagccgacatcgaggtgccaaacctccccgtcgatgtgaactcttgggggagataagcctgttatccccggggtagcttttatccgttgagcgatggcccttccatgcggaaccaccggatcactaagtccgtctttcgaccctgctcgacttgtaggtctcgcagtcaagctcccttatgcctttacactctatgaatgatttccaaccattctgagggaacctttgagcgcctccgttaccttttaggaggcgaccgccccagtcaaactgcccgcctgacactgtctcccaccacgataagtggtgcgggttagaaagccaacacagctagggtagtatcccaccagcgcctccacgtaagctagcgctcacgtttcaaaggctcctacctatcctgtacaagctgtgccgaatttcaatatcaggctacagtaaagctccacggggtctttccgtcctgtcgcgggtaacctgcatcttcacaggtactatgatttcaccgagtctctcgttgagacagtgcccaaatcgttacgcctttcgtgcgggtcggaacttacccgacaaggaatttcgctaccttaggaccgttatagttacggccgccgtttactggggcttcgattcgtagcttcgcagaagctaaccactcctcttaaccttccagcaccgggcaggcgtcagcccctatacatcaccttacggtttagcagagacctgtgtttttgataaacagtcgcttgggcctattcactgcggctcttctgggcgttaaccctaaagagcaccccttctcccgaagttacggggtcattttgccgagttccttaacgagagttcgctcgctcaccttagaattctcatcttgactacctgtgtcggtttgcggtacgggcacctattttctatctagaggcttttctcggcagtgtgaaatcaacgactcgaagacacaatgtcttctccccatcacagctcagccttaacgagtaccggatttgcctaatactcagccttactgcttagacgtgcaatccaatcgcacgcttcgcctatcctactgcgtccccccatcgattaaaacgattataggtggtacaggaatatcaacctgttatccatcgcctacgcctgtcggcctcagcttaggacccgactaacccagagcggacgagccttcctctggaaaccttagtcaatcggtggacgggattctcacccgtctttcgctactcacaccggcattctcacttctaagcgctccacatgtccttacgatcatgcttcaacgcccttagaacgctctcctaccattgtccaaaggacaatccacagcttcggtaatatgtttagccccggtacattttcggcgcagtgtcactcgactagtgagctattacgcactctttaaatgatggctgcttctaagccaacatcctagttgtctgggcaacgccacatccttttccacttaacatatattttgggaccttagctggtggtctgggctgtttccctttcgaacacggaccttatcacccatgttctgactcccaagttaaattaattggcattcggagtttgtctgaattcggtaacccgagaggggcccctcgtccaaacagtgctctacctccaataatcatcacttgaggctagccctaaagctatttcggagagaaccagctatctccaggttcgattggaatttctccgctaccctcagttcatccgctcacttttcaacgtaagtcggttcggtcctccattcagtgttacctgaacttcaacctgaccaagggtagatcacctggtttcgggtctacgaccaaatactaaacgccctattcagactcgctttcgctacggctccacatttactgcttaaccttgcatcaaatcgtaactcgccggttcattctacaaaaggcacgccatcacccattaacgggctctgactacttgtaagcacacggtttcaggttctatttcactccccttccggggtgcttttcacctttccctcacggtactggttcactatcggtcactagagagtatttagccttaggagatggtcctcccagattccgacggaatttcacgtgctccgtcgtactcaggatccactcaagagagacaacattttcgactacaggattattaccttctttgattcatctttccagatgattcgtctaatgtcgtcctttgtaactccgtatagagtgtcctacaaccccaacaagcaagcttgttggtttgggctcttcccgtttcgctcgccgctactaagggaatcgaattttctttctcttcctccgggtactaagatgtttcagttctccgggtgtgccttctgatatgctatgtattcacatatcgataacatgacataactcatgctgggtttccccattcggaaatctctggatcaaagcttacttacagctccccaaagcatatcgtcgttagtaacgtccttcatcggcttctagtgccaaggcatccaccgtgcgcccttaataacttaatctatgtttccaccatttttataagtcaaacgctcacatacggcttcgttttcattattttaaatgctcatttacataagtaaactctgctttaaaataatttaactcattgtctgctaaacgttttcttttataaaaagatttaaacgcgttattaatcttgtgagtgttctttcgaacactagcgattatttcttatgaattcaagcttatttaaaactctttattcactcggttttgcttggtaaaatctatattttacttacttatctagttttcaatgtacaatttctttttagtcaagcgctcgcataagcaatatcactttaaccaaaaaatatttgaatgttaaataaacattcaaaactgaatacaatatgtcacgttattccgcatcttctgaagaagatgttccgaatatatccttagaaaggaggtgatccagccgcaccttccgatacggctaccttgttacgacttcaccccaatcatttgtcccaccttcgacggctagctcctaaaaggttactccaccggcttcgggtgttacaaactctcgtggtgtgacgggcggtgtgtacaagacccgggaacgtattcaccgtagcatgctgatctacgattactagcgattccagcttcatgtagtcgagttgcagactacaatccgaactgagagcaactttatgggatttgcttgacctcgcggtttcgctgccctttgtattgtccattgtagcacgtgtgtagcccaaatcataaggggcatgatgatttgacgtcatccccaccttcctccggtttgtcaccggcagtcaacttagagtgcccaacttaatgatggcaactaagcttaagggttgcgctcgttgcgggacttaacccaacatctcacgacacgagctgacgacaaccatgcaccacctgtcactttgtcccccgaaggggaaggctctatctctagagttgtcaaaggatgtcaagatttggtaaggttcttcgcgttgcttcgaattaaaccacatgctccaccgcttgtgcgggtccccgtcaattcctttgagtttcaaccttgcggtcgtactccccaggcggagtgcttaatgcgttagctgcagcactaaggggcggaaaccccctaacacttagcactcatcgtttacggcgtggactaccagggtatctaatcctgtttgatccccacgctttcgcacatcagcgtcagttacagaccagaaagtcgccttcgccactggtgttcctccatatctctgcgcatttcaccgctacacatggaattccactttcctcttctgcactcaagttttccagtttccaatgaccctccacggttgagccgtgggctttcacatcagacttaaaaaaccgcctacgcgcgctttacgcccaataattccggataacgcttgccacctacgtattaccgcggctgctggcacgtagttagccgtggctttctgattaggtaccgtcaagatgtgcacagttacttacacatatgttcttccctaataacagagttttacgatccgaagaccttcatcactcacgcggcgttgctccgtcaggctttcgcccattgcggaagattccctactgctgcctcccgtaggagtctggaccgtgtctcagttccagtgtggccgatcaccctctcaggtcggctatgcatcgttgccttggtaagccattaccttaccaactagctaatgcagcgcggatccatctataagtgacagcaagaccgtctttcacttttgaaccatgcggttcaaaatatcatccggtattagctccggtttcccgaagttatcccagtcttataggtaggttatccacgtgttactcacccgtccgccgctaacatcagagaagcaagcttctcgtccgttcgctcgacttgcatgtattaggcacgccgccagcgttcatcctgagccaggatcaaactctccataaaaattatgatgtttgattagctcataaatactaaataatgtttgtaacttatagttacgttttttggaattaacgttgacatattgtcattcagttttcaatgttcatttaaattatctatggagcgggtgatgggaatcgaacccacaacatcagcttggaaggctgaggttttgccattaaactacacccgcttatttaattaagaattttgatgcggccgagaggacttgaacctccacgggatttctcccactaggccctcaacctagcgcgtctgccattccgccacgaccgcggatataggcatttaaaacatcttcgtttttcagaacgttatttattatattatgtttaaaaatatttgtcaataacttttaatcgtttttttacaataaattaatttgtgttatcagttgttaacacaacgctatttataataaaacattaagaacttattgtcaatatattttataaattaaatttagaattgactgtctttcaaatcaaagtttatttaatttgttcttttttaaggaacgtgtttaatcatactaactataagctgtacagtcaatagataaatccaatcaaaatgtcattaaaaatgtataattatcttttgtgctactttaaagctttaatcgggtaaagtttatatattatttattactaaaatacgccaagatttttaatctaatcaattgaatttcatcctatcaagtcacaatttatgccattacctatatcaaaagtagaaaagccgcgattgcgaagtattaaattacgacaatctcggctttaaacattttataaacacaatttcttcttattcaattactatgtttaccaatcaaaataactcactgataaattctatataaattccatacacctcataaataatcttacatatacacgaattagctctatttgtattgtacttatttcaattgtcttttcattcttaattttccattgcaatgtccgcaacgcatacgattcgtatcaactttacggatacgtatatattttgcatgacatttagtgcaataatattcataattcgcccgttgttgatagctttcaatgctgttacaaaatctaggcgctccaacctgttggctcaatcgtttaaaatcttgatctttatgttgataacctttaccagcaatatgcaagtgataatgacataattcgtgcagtataatttttacaacagcatcttctccataatgctcatattgttttggattaatttcaatatcatgggactttaacagataacgtccgcctgttgtacgtaactttttattaaaatatgcacaatgtcgaaacgtacgtccaaatttttcttccgaaaggttctcaaccattcgctgaagtttgtcattattcatgtggatcaatcatcgttaatgatactttgtctttatttttgtcaatactgtaaatccaaacgtcaacgatatcaccgacactgacaatatccattggattttttacgaacttcttagaaagtttcgaaacatggacaagtccatcttgtttaacacctatatctacaaatgctccaaaatctactacatttctaactgtgccactcaatttcattccttcttttaaatcttcaattgatagcacatcggatttaagtattggtgtttcaaactcatcccttggatctcgattaggtgctttcaaggatttaataatatcctctaatgtaggtacaccgacttgtaattcaatcgccagttcatccatatccaatgaatttaatttagcttttaatgcatcactacctaaatcattgccaccaaatccgagtttatctaacaactgatacgttactttatagctttcgggatgaatcgatgtattatccaatggctctgacccgtctactattcttaaaaatcctatactctgctcaaaagttttagcacccaaacgcttaatcttgcttaactctttattatgcttgattgcgccattttcttctctatatgcaattatatttttagcaatttgtgaacttagaccagacacatattgtaataatgatgatgatgctgtattgacatcaacacctacttggttaactgctgtttcaacaacgaaagttaatgcattttctagtgctttttgattaacatcatgctggtattgtccgacaccaatagatttaggatcgattttaactaattcacttaatggatcttgaacgcgtcgtccaattgatacggcacttctttcttccacttgaaaatcaggaaattcatctctagcaatttctgatgctgagtatactgaggcgcccgcttcattgacaatgatgaattgtactggcaactgatgctttttaattaaatctgcaacaaattgttctgtttcacgacttgctgtaccattgccaattgcaattaattgcacatcatacgctttaaccatttgtacaaaatccttctctgctgcttcttttttagaaactggtggatgcggataaatcacaccttttgctataaaagtaccaaatgggttaatgactgctaatttacaacctgttctaaatgcaggatctacgcctaatatttgtttacctttcattggaggttgcagtaatagatttcttaagttttcactaaaaacatctattgcatgattttcagctttttcagttaaatcagcatggatttcacgctctatcgaagggacaattaagcgtttcaagctatctttaatcgcctctaaaatataactgcgatttacattattatgattgatttcttgacgtgcaatgaagtcctctactgatgtcgtatcgaattcaaactttacagataatactttctctttttcaccacgattcacagctaaaactctatgattagcaatgcgtttaattggctcactgtatgcatagtacatttcaaaaatacctttttcatcttcagcatttttctttttagatgtagttaacacaccttgatgatacatatcttttaaaatttttgttctatatttaggattatctgaaatttgttccgcaataatatcttgcgcacctttgatagcatcttcaaccgattgcacttcttcatttataaattgttgtgctttttcttcaattgagacttcatgtttacgtgccttcatccatatcgctaatggttctaatcctttacgtttcgcctcagttgccctagtctttttcttttgtttaaaaggtctatataggtcttcaacacgttgtaatttgttctgttttaaaatatctttctttaattcctcagtaagtaatccttgctgttctatatttttgataacttcttctttacgtttttgtaaattgaccatatattggtattcgtcatcaatttgctttatttgaacttcatctagtccaccagtttgctcttttcgatacctcgcaataaatggtactgtatttttttcttcaagtagtgttaatactgcttcaatttgttttttactaaattgatatttctctatgattgaattaatcaattgattgtccatttacttaacccacactttttcttaaatttactcatttattttaacatattctaaagtacttctattaaggtatgatacttaatgcaattttaacttccaaaactttaaaaacgaattattaggtcatataatattttaaaatgcactaagattattgaaaatgacacaccatcatttcctaaattccataatctaagcctactttttttattctaataacaatccacttaattaaaccgacaattaaatatcttcttcacttaaattattaatactatatcgcgacatttatgtgaatacacattaaactacgttaataatgcattaattcgaaaatcttaattaaattaaaaatacccctcgatttcaattgactaatcaagggataattgtatgaatttttcattataaaacgcatcattaataagcaaattctatttatgtgctgcttcttgtaatttcttaattgccgttctttgaagtcttgaaacatgcatttgactcaaaccaatacgctcgcccgtttctttttgactcaaaccttcaataaacgtacattgtatgatttctcgttcgcgatcagataatataggtaatattttttctaaaatcatacgtttttcagttaagtcataatggtcatcttgttgccccataatatctaatagcgtaacagttgaaccatctttatcagcttcaatggaatgatcaacacttaacgcattataactttgtcccatttccattgcttctaacacttcttcttctgaaacttctaatcgatcagctatttcactgatagaaggtgaacgctctaattcagcggttagttcatcgctcacttttttgattcttggcccaatttctttaatacgtctcggaacatgtacactccaagttttatctcgtagatatcttttgatttcaccgattacagtaggtactaaaaaggcttcaaacttccgttcaaaggacatatcgaatctatttatggcacctattaaaccaaccataccaacttgaactaaatcttcgtgatgtgattgtcctttagaatatttatatgccaatgactcaattagtttttggtaatgtttaactaacttatcttgtgcatctgtattcttattttcttggtgttctttaatccattggttaatttgctcaggtgaaacttcattagctgatttcgactctttcgccattatttcgcacctgctctttttttatatacttagtcatactgattgtcacaccagattctttatatactgtcacttcatccattaaagattcgattaaaaataaacctaggccaccttcgcgtaaaaagtctatattttcgtctttatcgtaaggacctatttttgatttagttgtttcataatcaaagctgtcacctttatcagaaataacaattttaattttatcttctaaaatttcaaaatatatgttaataatgcccacattgtttttttctttgtatgcatgtttaactgcatttgtcacagcttcactaactgcaatcttggcatcttcaatatcatcatatgtagcaccagctctcgaaaaaacgccagaaagtgttaaacgaattaaacttacatactctgccgatgctggcacgcgcatttcgataaaatcttctttagattgcatgttattcgacctccgttccttcattaacatgcattaaatccttaagaccagtaatttcaaatagtctaccgatacgatctgacacacctaaaatgtatagttctttatcattttggtttaatgtttttaatgtacctacgaataaacctaaacctgtcgaatccatataactcacattttctaaattaacataaatatcacgagttccatcttgtctcataggtgttaaaacctcttctaattcaggcacagtataaacatctaattctccaccgactttaacttcgtaaaatttatcttgagtggttgtttctatattaagattcatttcattacactcctacttattaaaaatatttatcttcattttaagcgctgtatccaccatatttatatttcaaattattatatacccatcgaaataatttctaatcttcttttttaaattaatttactctttttataatcaaaatagtcatatcatcttttttatttgggttttgaagctttaaaattgcttcatagataatttgaacaatatcttgtgggtgcatatgtttatgttttttaatatattctaaaagtttttgtttttctataaaggtaccttcactatttctagcttcagtcacaccatccgttaaaatgataattaaatcatcaaggtatattggaatttcttgttgttgatatcgtgtttgtgaacttattcctaacactctacctctaactgaaatttcttcaaattcttctttttcagcgcgataaatatatccaggctcatgaccagctgaactacaatacaataaatggttcatttcttcatataaaccataaaacattgtgacgaacatattttgattaatattcttttcaacaacacgatttaaacgttttaagccatcactcggtaattgtgagtgtccataagaatccatgccaaactttatcatactcattgctaaagcagctggtataccttttccaatgacatctgcaacagcaaagctcattgtgccatcgttatggtcaattaaattaaaataatctccacttactttttgtgccgccactgaaataacgccaatttgaatactatcaaattgtggaatatctgttttaagcattgtttgttgtaagctagaagctaagtctatctctttatcgtgaacttgaagtttatctaccaatctttgataatctcgataactataaccaaagcctttaacgatttcttgtaagacatctaatgtcttgaacacatcttcacgcgttaagtttaacgtcaatatatagtttttgtgaatatcgacaatgtcttcaggcaagacgtccttacgaatcacttcgtcagtgtatttctcacacttttttatcaattctactttatcttggcacgttaaactttcatcaatcaaacccttataatgttgcttaaattcttccacgattagttgcctcctcacttcccttacaaagcaaatgcttaagcaaggataattatgattcacttactaacatttatttaattgcacttatcaattttgtcgtttgcaattttgctgtagatgatacttttaagctaaaaaaaactttaggatggaatacctaaagcctaaaaaacttaagacatccttttataataaaaaatatgaatatcataactggtatttgctaaaatctttgtttataagaaaattcttcgtacagaatttagaaatagttataattattataaagttattgtcttttatatcaatattttatttatctctgaaaaatacatataatagacgcctaatttttctgatgagctactgcattcagccctaaactaatcattagtgcattatctacttctttcattttatcatcggataagtacgtcagtttttctttcaatcgttttttatcaagtgtacgaatttgttctaataatataactgagtctttatccaatttatactttttcttttcaatctctacatgtgtcggtattttcgctttattaatcctaccagttattgccgcaacaataactgtaggactatatttattaccagtatcattttgaattatgactacaggtctgactcccccttgttcagatccctgtactggtgataaatctgctaaataaacatctcctcgtctaatcattcattcgttgaattagaagataaatatgtttcgttgcaatcgcatgcttcacactctatcggaaaagcttcgttcgctagggagagatttaaatcagccatttgtgaatatccttcttttaaagattgttctaagctatgacttctattttgactaaaagataacatatgagaacctccaattgattccaaaagttattaaatgacctttaattactctaatgataacaaattttatatgcactgaccatattattttaacaattcatttgttacaaaacgttgatcaccatcatgatagattcgcggcaaacgtctcgacaagttacaaagcacttcataattaatagtatgttgcttttcagctgccacctctaccgactgtggactttctctatgattatctattaaaatcaccgaatctccagctttaacttgatctggcacttttacaattgtctgatccatacatacgcgaccaacaacttcgcattgatgaccatttacatttacaaagctaccttgcataatgcgtaaatagccatctgcgtatccaataggtaacaatgctattgttgttggatcagtagctgtataagttgcaccataacttacagactcacccgcttgtagcgtctttgtttgaactacattagcaattaattgcacacttggtttaaggtgtactttaactttttgctgtacatactctgatggataatatccataaagggaaattcctggtcttattgcattacagaattggcaatccattaatagagaacctgctgagttctgacaatgtatatattcaggtttaattgcttcattgaccatatctttaaaacgttgatattgttcagttgtcatatctcctggttcgtcagcgcaggcaaagtgtgtaaacacgccttcaaatacaagttgctcatattgttgaatgatttcaatcacttcttgatacgttttagtgtctttaatacctaaacgtcccattcctgtatctaatttaatatgcaaccataactttttctcttgctcaccagaaatgtttttaattgcttctttcaaccactgtttagacggaaccgttaaggcaactcggtgttgtatcgctttatcaatatctttagctggtaacacacctaagactaaaattttagcagtaatcccatgcattctaagttctatcgcttcatctaacgttgctacagcaaaaaatgtggcaccattttccattaaatgacgtgctactttaacactacctagtccataggcattggctttaacgacagccatcactgttttatttggatgcaatgtactgaatactttgaaatttgatgcaacagcgtttaaatctacattcatatacgcagatctataatatttatctgacatattacttcctcctgtaattcccacacgttttaaaactagatcttaattatcattgtataacaaatttaaaatgctgacttttctaaaacaacttggctcatcgcataatgctcagtgtgtgagatactaacatgtacgatgaacccttcgtaatcaatctttggtttgccaagttcgtcgttgtaacagtctatatcgttaaaagctacatgttttcctaagcctgtgcctaatgctttactgaacgcttcttttgtagcaaacctgccagctaaaaattcaattttacgttgctcatgtgtgaaattgttgaatttgtgctgttcatttttagttaaaatccgctcaaccaattttggttgcttactatataacacttttattcgatcgatttcgattaaatctacaccaattccatgtatcattgattattcctcatttttattgttttctaaatgtctctcgttatttaaccatcgtttcaatctacgtgcttcacttctatctattaattcaatttcagcttgaccacccgctgtataaagtgtcaaagttgctaatcgatagcgtctcattataggaccaacatcgatatcaatattttgaatacgaaaatatggtattactttttcatccaaaaataaaatgccgtttcgtacacgcaaatggtgtttttcaaacgcatatctgcagtgcttatatcgatagactggcgctatgacaagcgtgaaaacaacaacaagtaatattataatcacactactaacaatggatatatagttatctaatatctcccaaaatagccagttcaaaatattaaatgctattaaaagtacaagcgctattggtatccaaaacagcacagcacttaacctcatcacttttttagcgtgtggtgacataaaattataatccctcatcattttcacctctcaaataccatgatttcaatttatttgcatcttcacttcttgcgtattttaagttaatcgattgggctcccacacctttagcaacaataaaactaaaattatttaaattgttgcgtttaagtaatgtatgttgccaagtgtcaaatcctataatgtgatgcgctttaaaataataaatatttcgtttcaatagctcgaaattctggatagtaatttgttcttctgtcattttaaaacccgcatgtttgacataaagatatcctttgatcacaaataaaccaataatgactactgttataatcgtaaataacaataataattgattccaaaaataacagccaattcctgccatagctatgacaataatactaggtattaaaaagtgtctgtggaaacctgaaaaaggcataccttcattaacttgttgataagataaatcaggtactaaattctggataatttgataggctttgtctcgtttaataaacggcaatatcgacacactacctgaatcattgtcatcatcttcaatttttttattttcaaaatcacttgtgatgataaaatgtattgctgtgtagccaaataatcttcgtatatatgactgatgttcaacaacagcttgcaatcgtttcgttggtacagtcactttcttcttgttaaatagaccatattcaattttaagttgctcattttcaagcatcaccgaaaagccataaaatcttatcatcgttataatcgttccaataatatatgccagtattaatactagtaaaatgatgattaatactgaaacacttacaatttgaacccattgactaatttcatgatttagcttcgaccatgggatcaactctcttacagcgccgtaaatcggtagtaaagctgctaacgttaccccaatggcgccactggtcattgccataaataacgattctttaaaattcatttgatatataggaatgcgtttatttttctgattaagcttactatcagagttctgcacttcatctagccgaccttctgcgatgtcttccacattaccttcaatgtcatgattacggttgccattctgctcagtactagacttttgcgccatttctgtcttcaactctgtttgcaattgatcaatatagcgttcaagatattcaccttgttttttcgaaataacacttaacacaattccatcacttggcgttttgatttgtaaatccacaccaccaatgatttgattgacgaccccttgtgtcatatcaacggactgaatacgttttatatttaattctttacgctttttattaaaaatacctgttgttaaaatgaaataattatcctcaatccaatatcgcgtgttcataattccgacaatttgagaaatgtatgatattaaaaagaatacaaatacaatacctatccataaatatgattcgggattcgtataatcaaaatctttcaattgaaagataacaaaaataaaaaagacgactatgttttgtttgatagcattaattatgccattaaaatatgaaatcggatgtaatttttgaggttcagacatcactttcaacccctctcaaattcgacatagttctcgcttcgattattttaacatcgtcatgagacatcatcggtaaataaatagtatgacctgcagtcataaatccaactttatacaaattaagcactttactaattggattagatttaatcgacaagtattgtaaacgttcaattcgactcgtttcttctttatatattaaaaatgatgtacgatattgtacacttagttgatcaatttgataaaagcggcagtgatattgccataaaggcttaataaataattttaatgtactcagagcacctaaaaccaacaaaatataaattaagtactgaggccattcaaatcttaaccatataaaataaaaaatgacatacacagctacactcaatataaattctaagccattcgtaatgtagtaatacaacaatgctgacttaggactcttagacaacttagtataatctgacatatacccctctccccaaataaaaaattatacggatttataatctatttcattttatttttatatgttgataattatagcatatggaatatttcatgctaatttattcttcctaaaggtatatctaaaaatttagttaagcagaaagtgcttgaattgctaaaaagacaccatgttataattttatcaacatgatgcctttcatctataatcaatctttcatcttatcaagagctatatttagttcaagcacattcacataatcatttgttaacacaccacgctgcatacgatgttgaatcaagtcggtcactcttgaagtagatatatgacgagcatcagcaatacgaggtgcttgcttcaatgcattttcaaccgtaatatgcggatctaagcccgacccagaacttgttgcagcatctattgttacatttgaattaccaaatttaacatgatgtttcacgcgtgctattaattcggtgtttccattcgattcattacttccacctgatgatacgccgtttttatataatttttcaggattcatattataaccaactgcactcggtctcccgtgaaaatatcgtgtatctgtccagtgctgtccaatcaattttgatccaactatacgattgtcatacgtaattaaactaccatttgcttgttgataaaaaaatatttgaccaattaacgtgatagctaacgggaataaaaatccacacaataccatagttattatcgttaaacaaatactatttcttatcgtattcatggtacagactccttcctcttcacacaaaaaattgtactatcatatctattaatttaatgcctaaaaacgggacgattaatccacctaatccataaatcaacatattatttataaaaattctatcaatgctgtaaccctttacttttacacctttcatggcaattggaattaaggcaacaatgattaatgcattgaatatcaaagctgatatgattgcagatttaggtgacgataaatgcataatatttagtgaagtcatttctggaatcgttgacatcattagtgcaggtaaaattgcaaagtattttgctacgtcattagccaaactaaatgtcgttaatgcacctctcgtcattaataattgtttgcctatttttacaacctctattaactttgtaggattcgaatctaaatcaattagattggccgcctctttagcactaattgtcccagagttcatagctaatcctatattcgcttgtgctagcgcaggtgcatcatttgtaccatctcctgtcatcgcaacaatatggcctttcgcttgttcatctttgatgactttaattttatcttcgggtttacactctgcaacaaatctatcaacacccgcttcttttgcaattgtagctgctgttaaagcattatcgcccgtacacataactgtttcaatgcccatttttctcaattcagcaaatcgttctacaagaccatctttaatcacatcttttaaataaatcacgccaagcatgacgttgttttcaatgactattaatggtgtgccacctttactcgatacatccatacagatagactcaatattaagaggaatatcgccttgttgttgtttgacaagatttatcatactattaggtgcacctttgaataccgatatttcatttgtaatgattccgctcattctagtttcagctgtaaaaggcttatatgtgccatcaatgtctttaggcagctcatttatatacatctgcttcgctaatcgcacaatactttttccttctggtgtatcatcgtagattgatgacatataagcagcgactatcaatttttcccacatttgttgattcactggtaaaaattcactagcgattcgattgccataagtgattgtgcctgtcttgtctaaaatcattacatcgacatctccacatacttctacagcacgcccacttttcgctaatacattgaattgagtaacacgatccatgcctgcaataccaatcgccgataacaaaccaccgattgtcgttggtattaaacatactgttaacgcaatgagcatcgcaataggtaaaattaaatgcaggtaagatgctattggatataatgttacaataacgactaaaaatataattgttaacgttgtcaataatgtaaaaagtgcaatttcatttggtgttttatttctttccgccccttcaactaaggcaatcattttatctaaaaaagatgtacccgcttcactctcaacacgtatttctaaccaatcagatgttacaagtgtaccgccaatgactccatcaaaatcgccacctgattcttttatcacaggtgcagactcaccagtaattgcagattcatcaacggttgctaatccatttattacaacgccatcagcagggattgtttctccattttctacccgaatattttgtccggcttttaactctgtggcgttcactatccgatacgcatcattttcttctatcaatcgagcagttaaatttgattgtgcttgtcttaaactatcagcttgcgcttttccacgaccttcagcaaaggcttctgaaaaattagcaaacaatatagttattaataatatgataaaaattgtaatcaaataacctcgcgatagatagctagttccaaatatgtcaggaaaacatattaatatcaacgttaaaatcattccaacctcgacgacaaacattatcggattttttattaattgtttaggattcagcttataaaaactcattttcaaagcttctatcaccattgtttgattgaaatatttatttacatgatgcattttttccatccctttactttattttaaagttaaaaattcaccaataggaccaagtaatagtactggaataaacgtcaaaccacttagtaaaacgataaatacgattagtgatacgccaaaataaggtttatcaatcgctattgtatatttatcttggtggtatgattttttattcactaaacttgatgcaatcattaattgcaaaataattggtatataacgagaaagcaacataatgattcctgtagagatattccagaatgttgtatcatctttcagtccttcaaaccctgatccattgttcgctgtagctgacgtcatttcatacataacttgtgagataccatgaaaagacggattcgttatactttcacttgctccaggaatcataaaagcaagtgctgaaaatactaaaattaaaattggatgtatgagaaagactaagacaatacatttcatttcacgggcgccaattggcatatttaaatattctggtgttttaccaaccatcaaactgcatataaacaccgtcagtaagacaaatatcaataaattcatgagtcctacgccttcgccaccaaatacaacatttagcatcattaataccattggtcctaatccacctagaggcgttaagctatcatgcatgttattaacagaacccgttgtaaatgccgtcgtaataactgtaaatagtgctgacaagcctgctccaaaccgtacctctttaccttccatattcggtccataaatgcctaaattcgctagtattggattaccacgatactcactccacatagttaatgtaagaattgctataaaaatgaaaaacattgcgacaaataatattagcgcatgacgatgcactcgtttaccatgtctacttaacattcgaccaaataagaacaacattgacataggaagtaacatcatactgcccatttctataaaattgctccaaatatttggattttcaaaaggtgttgcagaatttcctgctaaaaatcctccaccatttgtaccaaggtgttttattgattcaagtgatgcaataggtccaaatgcaatatgttgaatatgtccgcttaaagtccgaatcattaaattagcatgcaacgtttgtggtacaccttgagttatcaataaaatactaattaaacatgataatggtaaaagtactcggacaataaaccgaacaatatcttgataaaaattaccaatgatattagtcaatccagttaaacgtctcaacatcgctatacaaacggcgtaacctgatgcactagatgtaaacattaaatatgtcattacaatcatttgcgttaaatatgtcacacctgattcaccgttatagtgttgtaaattactatttgttaaaaaagatattgctgtattaaacgctaaatctatcgattggtttaaattatgatttggatttaaaaaaagccattgctgaactattagcaatacaaatgttataaaccccataaatccattaaatgccataaaatgtttgacatatgttttagctgacatatgttctaaatctgtgccgataattttaaaacacatattttcaaatctagtaaatattaaatctactcttgacgattgcaccaatgctacgcgatatagatatccactaaaaacatacgcaatcataaccatcattgttagaaacaaaattatttccatgataaccctcacttaatgtatttctaaaatttttcactacgaattaaggcataaaataaatacaaaactaatgcaataactaccaataataaaacgatgagcattgccataacctccttacaacacaacaacatcgtaacaacttgtttatgagagaaatattaattttcaaacttagttattaagaaatcattaagatgtgtatgcagaaataaattttatagcatttaattgtgaagaatattatgatattgctatcgaggtgaaggttatgtcaaacactgaatcgctaaacataggaaaaaagcgtggatctttaacaatttacatcggttacagtccaggtgttggtaaaacatttgagatgctttcaaatgccattgaactatttcaaagtaacgttgatattaaaataggatatattgaaccgcatcaacgtgatgaaacaaatgcattagctgaacaattacctaaaatcgcaaccaattttactaaacatggtagtcatcattttcaatatttagatgtcgaccgcataatcgaagaatcgccgacaatagtacttatcgatgagttagcacatacgaacatttctagagatcgtcatgagaaacgatatatggatattgaagaaattttaaatcatggtatcgatgttcatactactttgaacattcaacatattgaaagtttaagtagtcaaattgaactgatgaccggtgtacatgttaaagaacgtgtacccgactatttcataatgagcgccgatgtattagaagtcgtagatatctcacctgaacaattaattaaacgcttaaaagctggtaaggtatataaaaaggataggctagatgtagcatttagtaatttctttacgtatgcccacctaagcgaactgcgtacattgacgttaagaacagttgccgacttgatgagtgataaagaaaaagtccgacacaaccataaaacgtcactcaaacctcatattgctgtggcaattagtgggagcatttataatgaagcagtaattaaagaggcattccatattgctcaaaaagaacatgcaaaattcactgctatttatatagatgtattcgaaaaaaacaggcaatataaagatagtcaaaagcaagtgcatcaacatctcatgcttgcaaaatcattaggagcaaaagtaaaagtagtttatagccaaaccgttgcattaggattagacgaatggtgtaaaaatcaagatgtaaccaaattaattatcggacaacatattagaaataagtggcgagactttttcaataaacctttaattgaccatttaatgtcctttgaacatagctataaaattgaaatcgttccaatcaaacaaatacctgttgaattgaaaatgaacaagtcaccctatcgtcctaaaggcaaacgtttcgccatagatatgttaaaaatgattttgattcaaataatttgtgtaatgatgggactatggatttatcaacttgataagtatgagtctagtacgattattttaatgatttttctcatcggcatcattttattatccatttggacgcggtcctacatcattggctttttagcagcaattattaacgtatttgtttttaattatttttttacggaacctagatatacatttgaagtataccgctttgactatcctattacatttatcgttagcattttaacaagtattttaacaagtgctttattaaaacaaattaaattccaatactccattactaaaaagcaactctatcgtacagatttattatttcaatttaatgattcgattaaacaaacttatacagttgaaaacttactaataaatgctggataccaaattaatcaattattgcaacaatcaattactatatacgttatcaatcaatccaaagtaattaaaacaataccattgcaaaaccatatcgataatacgactcaacagcatgaacaagcattaagctgggtaattaaaaatgaaagacaagctggtgcaacaacagatacatttccaggcattaataaatggttgataccaattggcacatctccgattaaaggcattctagccattgataaccaaagttctcaagtgattaatccatatgatgcatcaatattagaatcaatgttaaatgaactttctctcgctgttgaaaatgtgacgttacttaaacaaacgagagaatccatgttacaggctgaacgccaactgacacattcaaattttttaagatcaatttcgcatgacatacgtacaccgttaacaacaattatgggaaatttagatattttagtatcacatagtaaagatatgtctatcatagaaaaggaacaattacttgtgcatagttttcaagaaagtcagtatttatatctattagtgacaaatattttatcattaacaaaattacaatcatcaaatgttcagataaaattgcaaccttatctcgttagtgaattagtagaagaaatcgatatgattttagaacgtcgccatttaaaaaagcgtataactgtatcatcctcagtagatttacagtttatacacattgacagtaagttgattttacaagctttattcaatttgattgaaaatgcagttaaacacacttctactgacaccaaaatcaatttatctattcgttatgctagcgatgaacaaatcgaatttgccgttatagacgaaggacctggaattagtttagaagaacaacaaaagatattcgagcctttttacacaggatcaaataaatattttaaagataaccaaaaagaaagcatgggactaggcttatatttagtacagactatcctacacaaacatcaatcaaacttacaatataaaccgaaccaaccacacggcagtatattctatttcaatatagatacagactttaatgaaggagacatataatgcaatctaaaatattgataattgaagatgatcacgcaatcacacatttaattgatgttgcattaactttagattattacaatgtaactacagccaaaaatgccacacaagcacactttaaaattcaaattgataaaccagatgtcattttattagatttaggtttaccagataaagatggattatgtttgatttcagaaatcagacaacatactgacattcctatcattgtaataagtgcaagacaagaagaacaaacaattattcaagctttagataacggtgcgaatgactatatgactaaaccttttaatgttgatgagcttcgggcacgaattcgagtcatcgaaagaatcgctaagtcacatcaagaaactaacattgtatttactaacggtttgctaagcatcgactttggctccaaatctgttgttattaataatcaggaggtacatttgacgccaaatgaatttagcttgttagaactattgtcaaatcataaaggaaaagtactcacttatgagatgatattaaaacgaatatatggctatgttaataagactgaaatgcctagtttaagagtgcatatgacatcattaagacaaaaactttcacaatgtcatgaggacgcaaaagatattattaaaacacatccacgcattggttatcaaatgttgcagtggaaagagaagtaattaaataaaaaagatcgctgccattaaacgaatgattggcagtgatttttttatattcaacttattatttatcgcgcactagtgtcagcaaaatgccctatcatattttacaagaacatgataccgaaattactttcataaagtttatttatgttcgattattcttaatttaagtagttgttatattctagattcatatttatattaacacagaatgatataaccgcacacagatctcaatccaattaaatatttaacctttaaaacgttagtactttgatatctacagagaatcagttattgaaaacaaaaaagagctcaagacattacatctttaagctcttaatctataaattatttttgatggtcagcaaatgtgcgacctttcataggtctgcttccaccgctgctcttctctttacggtcgaattttttagtacttttcttcttgcttgagtatccttttgaacgtttactcttactgtcaaatttaggattaccacgcttactatttctgttacgagaaccacttggtttaccgttacggcctttgcgagataatggtttttcaaaagttaattgaacttcaacttcatcattcgcttctactaactcttgtaaaagtgcagcaactaaatcaacatcgttatattcatttaacaactctgtagaaatgcgtttcaagcgtgattctgactctttagacatccagttttcaactttttctttgatgtcatcttcacgtgcttgaagtacttctttacgatgtggtggacgaagtgcgctcatttttctaccattagcatcttcaatttgtctaatgtaatccatttcaattggatttacaaatgttaccgcgataccttctttaccagcacgacccgtacgaccaatacggtgtgtatagctttcagtatcttgaggtatatcaaagttataaacatgactcacaccagaaatatctagtcctcttgctgctacatcagtagcgactaaaatattaatttggtcatttttaaatttctttaatacttctaaacgtttcgcttgtgtaatatcaccatgtaagccttcagctttatatcctttagaaatcaaagcacttgttaattcatcaacacgacgttttgtacgtccgaatacgattgctaattcaggttgatgaacatctaggaaatttgtaaatgtatcaaatttctctaattctttaacaattgtatagaattcttcgatttgtggatcagacatttcattattcattgtcttaatgatttttggtgatttcataaattgttgtactaaagcttggattgctttaggcattgtagctgagaacaacattgtttgacgttgtactgctggaattttatccataataaatctcatatcatcgatgaatcccatattcatcatttcatcagcttcatctaaaatcaaagtatgaattccgtccgtttttaatgtgcgacgatttaaatggtcgataacacgcccaggtgttccgactacgatttgtgggccttttttcaaggctttaatttggcgttcgataggcataccaccgaatacagtaacaacttggacaccttgtccacggctaaattctcttaattgttcagctacctgcattgccaattctcttgtaggtgctaaaatcaacgattgaaccccttgtttccctactactttctcaattaaaggaataccgaatgctcctgttttacctgtaccggtttgagcttgcccaaggatatcaattccttgtaacgcataagggatactgtctttttggataggtgtcggctctttaaatcccattgattcaagtgactgaaccgtattatccgaaatccctagttctttaaaattttgcaaaataattctcctttttacctgtttatttctcaatatacttttgcatataagttcattaatatttcatcaacttctatatagtaccaccaaaaaaatttaatcgcaataaagcaatttgcgaatatttattagaatcacattaattgattgtcatatttttgtcaaaaagctagcattagataagatgtaagcgttatgcatcattcgaataatcattataaaaaattttttataaaatacgtatatcgttaacattccacaacaaattttactgaaacacatgtaaaattagacgttgtaatactacatcttttcgtaaaatattatataaacattcaaactacttcctatataaagtgtgtacatagaattaaccttgatttagtttcaaatttatagatttaacataaaaagaaaaaggcaattttgtatttacacacaaaaccacctcttctttgtaatcttttagtattaattcaaatcatttttataagtaaaaggtcgctcgactaatctctatgaaattaaagcatttacgacttcttctaacttcataccacgtgatcctttaactaatacacgatcatgcgcttttaaatcatttgttaaaacttctatcatatcgtctttagaattgaagtgttgtgctttttcgacatgttgctggcccgaatcataaatatactttgcttcattaccaaacgtatacaacacatctatatgcttttcttctaaataattacctacaccgatatgcatttctttgctattttcacctaattctaaaacatctcctaaaattagaatgcgacgccctgtcaaagtactcagtgtatcaatagctgctctcatacttgtaggacttgcattataggcatcatttatcacagtaatatcattttctaatgtatgttgctccatacgcataccagttaagctaacattttttaaattttgatagattgtgttatatgtcaaacctaattcatgaccaaccgcaatggcaatcgtcgcatttttcatattatgctttcctaatattggcagatcataatgttctttattattaattgtaaatgaaatacctgtagtatctctatcatcaacagaacaaactaattcattatcagtagcaacaccaatactaatacattttgcattttcaacttctttaacatgtggtttcaataatggttcatcgccatcatatataaacgtaccattatcttttagacctattgtaatttcagatttagctttagcaatcccctcgcgcgaacctaaatcttgcatatgtgactcaccaatattagttataactgcaatatctggttgagcgaggtttgacagaaattcaatttcatggaaacctgacatccccatctccaatattgatatttcagtatcattatctaattccaaaatagttaaaggtaaaccaatttcattattgtaattaccttgcgttttcttaactttaaattcggtatgcaatacactttcaatcatatctttagtcgttgttttaccattagaccctgtgacggcaattactttagggtttacatgtctcaagtaagcttgtgccaattgttgtaatgccgttaatgtgtcttcaacccatataataggcccgcttacattttcatctataggtgtccctctttgataaaaagcagctccagcaccatcttgtaatgctttagagacaaagcgatgaccgtcaacattttcacctttaaatggtataaataacatatttttagaaattgctcgtgaatcaattgtgactccatttatctcttgatttaaaaattgatcttcaatttcacaaggaatccatgattgaatttgctttaatgtaacattaatcataataacaacctcagttagtcaattttgtatttatttttctgtttatcctggtgacgttctttagcaagctcgataagttttgtaatcaattctggataagataagcccatattttcccataactttggatacatactgaaagccgtaaatccaggcattgcatttgtttcattaatatatatttggttgtcttctgttacaaagaaatcagcacggactaaaccagaacaatctgtcgctttgaatgcctctaatgccatatttctaagcgttaattgaacatcttcgtctaagtcagctggaatttgtaattgaaccttaccatctttatattttgatttgtaatcgtaaaacgcgacatcttttacgacttcacctggccatgtcgcttcaggatagtcatttcctaaaactgctacttcaatttcacgtgcgttaacgccttgttcaataacaagcttacggtcaaattggaatgcttctttaataccttctttaagttccgcttcattattacatttactgatacctacacttgaccctaagttagcaggtttaacaaagactgggtaatttaatttatcatttactaattttaaaatgttatgttcatatttttcatattcagaacgtaagaaactaatataaggtaactgtggtaaccctcggtgttcaaataattgtttcattacaagcttgtccatagaacttgcagctgacaatacaccatttcctacatatggtacatccaaaacttcaaaaagtccttgaatcgtgccatcttcaccattaggaccatgtaataatgggaatactgcatcgtatggttgtcctgaactactttctttcaatagctgtgaaatctcaagcgcctctccattttctaaatgaagctcatcagtagatttaatttcagctgtaatattattttgctttctccaatcaccatcattggtaatataaatgatatcaacatgatatttgtctttatctattgcatttaatacattttgtgctgtcagaatcgatacttcgtgttctgcacttttccctccaaaaacgatacaaatattttcttttgtcatttcgttttcctccaatgatatatcagggtttgctaccttaatataaattaatattgatttagtcctattgttaattgatttattcgcatctttgaatcttaatagtatcacattttaatgctattttgcattttaaaaacgaggcgttatgtgtctgtatctatgttgattcatttataatcagaacaatattcccttctattttattcctaattcaaattgaaatctatagctgatatcactgtgatattctagctaatttttaaaaagtcatgtaaaattgatataaacattagtgagtataaaaggagtttgcaatgaattattcatctcgtcaacagccggataagcattggcttcgcaaagtagactgggtattagtagccactatagctgttttagcaattttcagtgttctgcttattaactcggcaatgggcggtggtcaatacagtgctaatttcggtatcagacaaattttttattacattttaggtgcaatttttgcaggtatcatcatgtttatttcacctaaaaagattaaacattatacatatttattgtatttcttaatctgtctattattaataggcttgctcgttattcctgagtcacctattacacctattatcaatggtgccaaaagttggtacacgtttggccctatcagtattcagccatctgaattcatgaaaattattttaattttagcattagcgcgtgtcgtttctagacataatcaattcacatttaataaatcattccaaagtgatttgttattatttttcaaaattattggtgtctcgttagtaccaagtattttaatattactgcaaaatgacctaggaactacattagtattagctgcaattattgcaggtgtgatgttagtaagtggtataacatggcgtatcttagcacctatctttattacaggtattgttggtgcaatgacagtcattttaggtattctatatgcacccgcattaattgaaaatttattaggtgtccaactgtatcaaatgggacgaatcaattcatggcttgacccctatacatatagtagtggtgatggctatcatttaactgaatcacttaaagctatcggttctggacagttactaggtaaaggatacaatcacggtgaagtttatatacctgaaaatcatactgactttatcttttcagtgattggagaggaactaggttttatcggttctgtcatattgatcttaatatttttatttttaatcttccatctaataagattagctgcgaaaattgaagatcaatttaacaaaatctttatcgttggtttcgtcactttacttgtgttccatattttacaaaatattggtatgacaattcagttgttaccaatcactggtattccattaccatttattagttatggtggtagtgcgctatggagtatgatgactggaataggtatagtcttatcaatttattatcatgaaccaaaacgatatgtagatttataccatccaaaaagtaattaatttaaactattttgagtttcaaatatcataacttttcaagatgacgttatatagtctatttatgtcgtcgatttaaaatgtcatatatagatattactcgataatagcaatccctctttgaagtacacattataaaatgtatactctaaagagggattttgttatatagtacttgctttcattttagtaaattcagtcaaaaaagctatcatcgaatagtccgacgatagctttaacggtgtgtgattcacaatcacagtcaattattttaattcgtgacttactttattagatgctggcaaagtattaataatgtctaaacgagatttagtttttttaatattcacacctaatgatgacaatagtttgactacattttgaatcttttcaggacgtttcattattatcacctcgtttggatcgctttcaataattatcttaccctattcgacatacctttactacatcatttacaaaatttttaatttattttcaaaattaaaatctatagcgcactctacattataccctaaaatacaattttgtatccttcatcatagatttctttttcaatactattcaaatttgctggtgtctcatacgatacagttacttgaccgtctattatattaatattcacttgatgaacacctatcatatttgaaatgcgttctgtcaattgacttacttgttcttctgtttcaattcccgctgtgtaaatcgtattttgatgtatcatcttaaactcctttagtctttaatcaatttttgaaaagtcactaataactcttccattgcctcttcctgagcaccttgattaactttattcataatacaacttttcatatgttgttctaataactttgtcgcaacactgtttaacgccgaacgtgtcgctcttatttgcgtaaggacatcatcacaatagacatcttcttcaatcatgcgattaatcgctctcacttgtccttcaattcgatttaaacgtgatttaagattcgtttttatttgttcagaatgatgtgcattatcttgttcagtcatagcattcactccttcatttacattccttactatactatatcccataaaacacaacgtcaacacaaagtgtgtttttcaaactaaattgtcatgatatttaaattgcttcatgatacaattaataagatatactactcgtttaagattttcgatgggaggtttcaaatgatagagttattatccattgcactcaagcattctaatattattttaaattcaatatttattggtgcatttattttaaacttattattcgcctttaccattattttcatggaaagacgttctgccaattctatctgggcttggttactagtcttagttttcttgcctttattcggcttcattttatacttactattaggacgacaaattcaacgtgaccaaattttcaaaattgataaggaagataaaaaaggattagagttaatcgttgatgagcaattagctgctttaaaaaatgaaaacttttcaaattccaattatcaaattgtaaaatttaaagaaatgattcaaatgttgttatataataacgcagcatttttaacaacagacaacgatttaaaaatatacacagacggccaagaaaaatttgatgacttaatacaagacatccgtaatgctactgattatattcattttcagtactatattattcaaaatgatgaattaggtcgtaccattttaaatgaacttggtaaaaaagcggaacaaggtgtagaagttaaaattctttatgatgacatgggttctcgcggactgcgtaaaaaaggtttacgcccgtttcgcaataaaggtggacatgctgaagcatttttcccatcaaaattacctttaattaacttacgtatgaacaatcgaaaccatcgaaaaattgttgtaatagatgggcaaattggatatgtcggtggttttaatgttggtgatgagtacttaggtaaatcaaaaaaattcggctattggcgagatacgcatttacgaattgtcggggatgcagtaaatgcattgcaattacgatttattctagattggaattcacaagccatacgtgaccacatctcctatgatgatcgttatttcccagatgtaaattctggtggaacaattggcgttcaaatagcttctagtggtcctgacgaagaatgggaacagattaaatacggttatttgaaaatgatttcatctgctaaaaaatcgatttatattcaatctccctatttcatacctgatcaagcctttttagattctattaaaattgcggcattaggtggtgttgatgtcaatatcatgattcctaataaacctgaccatccgtttgttttttgggctactttaaaaaatgcagcatccttattagatgccggtgtcaaagtatttcactacgacaatggctttttacactcaaaaacacttgttatagatgatgaaattgcaagtgttggaacagctaatatggaccatcgcagtttcacattgaatttcgaagtcaacgcttttatttatgaccaacaaattgccaaaaaattaaaacaagcttttatagatgatttagcagtatcttctgaattaacaaaagcacgttatgctaagcgaagtctttggattaaatttaaagaaggtatttcacaattattgtcacctatcttataaaatagaaatatgaggagtgtaactttaatgcaacaatcagacatcattagtgctgccaaaaaatatatggaatctattcatcaaaatgattatacaggccatgatatagcgcatgtatatcgtgtcactgctttagctaaatcaatcgctgaaaatgaaggtgttaatgatactttagtcattgaactcgcatgtttgcttcatgataccgttgacgaaaaagttgtagatgctaacaaacaatatgttgaattgaagtcatttttatcttctttatcactatcaaccgaagatcaagagcacattttatttattattaataatatgagctatcgcaatggtaaaaacgatcatgtcactttatctttagaaggccaaattgtcagagatgcagatcgtcttgatgctataggcgctataggtgttgcacgaacatttcaattttcaggacactttggtgaacctatgtggacagaacatatgtcactagataagattaatgatgatttagttgaacagctgccaccatctgcaattaaacatttctttgaaaaattacttaagttagaatctttaatgcatacagatacggcgaagatgattgctaaagaacgtcacgactttatgatgatgtacttgaaacagttttttacagaatggaattatcacgactagacattgaagttgtagtatgatgatgcgatgtaatggcgtattgttgtggaagcttggtgtcatgccatgttactttgatgtgttgttgtggaagcttggtgtcatgccatgctactttgatgtgctgttaccacgatgcggcttgatgtagtgctatgatgtggcgttgcggtgttatggtgttatagcccggtttggtgttgatgccatgttactttgatgtgctggtaccatgatgcgacttgatgtagtgctatgatgtggcgttacggtgttatggtgttatagaccggtttggtgttgatgccatgttactttgatgtgttgttgctatgacgcgacttgatgtagtgctatgatgtggcgttgcggtgttatggtgttatagccaggtttggtgttgatgccatgccgttacgattctatgatatgttgttgggacgttgcaatgtgtattataccgttgtgacgttattatttcacactgttacatgtattagtgaattgctgtggaaatgttgcgacatatactgcaacactgatgaatcattgtgtcaagatgacattgcaatgaagagaggctactctgttattaaccactttttacatactgaaatctcgttaacattatttcaaataaaaacagcagtaggatgactttcacatttgaaatcatcttactgctgtttctatttatcacatattgtataatgtgacactaagtttcgctattgaagcgaaaaataatgtgcgccctataaagttaaaattatcttcaacttttagggggcacattatttggacttgctaaggttatttctttttctttttagacactacttgtgtgtttttgccttttttattgctgccgccgttgtgctctctttcatacgcttcaatgaaaggttgtacttcttttttagcgactttttcataataaatgttcgcaaagtgtgtttgaactacaaggaacgccgcactgactgaccagtacaaaccaagtgctgatgctgagcttaatgaaatccagataatcataattggtgaaatgaccatcatcatgtaacccatttgacgttgttcgtctggcatcgttttacttgatacatatgcttggataaagtataaaacacccgcaataattgtaatccaaatatcaggacgtcctaaatcgaaccataagaagtgtggatatttaaacaaaccatctacaagttggtcttttagtacaaagtataatcccatgatgattggcaattggattagcattggtaaacaacccaacatactcttaatcgggttcatgtcatactttttatatacttgcattaattcttggtttgcagccattttttcttcttgtgtacgcgcacgtttcactttttcttgaattttttcaacttctggctttgcaactttcattttttgacgcatcatatgactatttttatagtttgacaacatgaatggtaataaaataatacgaattaccaatacaaggataataatagctaaaccataattgtcgtttaataagttatttcccaaccaatccaatacatttttcattggatctacgaatgtattgtagaaaaacccactacgtttttcaggtttagaatagtcacaaccagccaaaaagaccataatacctaaaaataatggtagtaacgcttttttcttcatttttccacctctatcattatattcacataggatttattctatcacattaatgagtacgtatgaaacaataagtggaaaaatttaactaattattaaaaaaatctttgaatcgattaacagtcttttcaatattttcacttttagaaatggctgaaatgactgaaattccattggcacctgcttctacaatcggcgccacgttactagtatttataccgccaatagctacaatcggtagttgcggattcatttctttaaatgttgcaatcatttctggacctactggtgtatgcgcgtcatgcttagacggcgtaggatagattggtccaacacctatataatcaacatgagttaaatcagattttgcatactcatctaaatcactaatacttagtccaataattttatcagtgaaatattgtgctatctctttgactttcgcatcatcttgaccgacatgtataccatccgcgttaatttcttttgctaaggatacatcgtcattaacgataaaaggcacatcatatcgatgacagagatgctgtaattctttagctaatacaagtttatcgtttccttttaaagctgattcacccttttctcgaaattggaaaagtgtaatccctgcctttaatgctgcttctaatacttcatgaacagttcgatgactcggaacatcggaggtcccacaaataaaatacacatttagatacgattggttaaacatattattccacctcttgaatgcgaatccgttgttgataggttgtttcatttaaatgatataacgtatcaagcaacaatggtgaaaacgtaccaggaccaccacacttttcattttcagcagctacctcagcagcaatattaaatacgcttaccgcttcaattaacgcttctatgtctggttctgtttctctaaataaaaatccagcaataacgcctcctaataaacaaccggctccagttactcgtgctaataatggagatccattagctaaaacgatggctttatcaccttgaacaataacgtcctctttacctgtgattactattgcagttttatatattgcgtaagcctttttcgctattgcaaccgcatcaagattagcatcactatctgtacctttcatagttgctgtatcatcaatcaacgctaatatttcagatgcattgcctttaattactgatactttcgctgatttcaataataatttacaaaattgctttcgatatgtagaagcaccaacagctacagggtcaaatacaataggtaagcctgcctcatttgccgtttgagcaatcgcaataatatcttgttcattttgtgctgttaaagtaccgatattgattaatagcgcttgtgcaactttgtaaaattcttcagcttcttcgggagcttcactcattgcagggctcgcaccaatacttaataaaccattcgctgtaaaatttttaactacatcgtttgtataacaaattgttaatgggttttcaatacgtattttatttagataattcatcgtctaatccctctttctttaaatatgcaaaatgattcaccggacctctaccacggccgatttcaggcgtatattgtatactcattgaaataaactttttagccttgtgtacagcctcaaataatggtctaccttttgcaagttctgccgttataactgctgaaaatgtacaccctgttccatgcgtatgttttgttttaaatcgttcattttcaaatgtttgaacaccttctttagtaaataaataatcttttgctatatcagtatcatttgaatgaccgcctttaatgatgacacctttactaccaatctcattaataaagatgcggccagcctgcataattctttcttcactatcaatggttagtcccgttatttcttcagcttctggtaaattcggtgttactacatcagctaatggcaataacgtatgctgcaagttttgctttgtgtcattatccattaatgaatcaccacttttcgccaacataacaggatcaattacatacggaatagattcatgttgcattaaataatgacgaatcgtttccatagtatctgctgtagcaatcatccccgttttaatagcatgcggtaaggtatcgttgaagacactatcaagttgttcatctacccattgatgatttaaattatgaatatgttgtacgcccaatgtattttgagcaacaatacttgtaacgacgcccataccatatacaccacatgaatgaaatgattttaaatcagccattacgccggctccacctgttggatcagtacctgcaatggttaatgctattttaggtttaatcatttacttttcctccaaattcccattgttctagtgtcatagccatattgaaaaatcgacgctcatgtatgcaactttctaaaaatacttgtttcacttgttccaattccttgtcagacattgattcggctaatttattcattaatgcctcaaatacgttaattatgtcatccatttcagtactataaaaatcaaaccattttgccgtatctttttctctattaagcttatgatcactttgagagcgcttagctaattctgcataaatgtatggacaaggtgccattgcagcaattgtataaatagcattttcacgactatgcgcttggaaatacatatgttttatgtaatggtcgccacttggaggccaaacttttgttttaatgatttcttcgtatgattcaccaacaatttgcgctaaaatatcatgcgcaagtacttcaccttcaaccataaattctatttgctctactaaaaattttacgtcattcatgctattcattttcggaattaacaaagcatataagtttgtaaattcttttaaataagctgcatcagcttgtaaatagtgacgtaatgcatcagcttgtatattgcctaataacattttttgaataaagtcatcctcataaatatcattaatgattggctttgcagcttggtacaatttttgtgaaaattccattgtaaaaaatcctccctaattaaaaaaactacttccaacatgaaagtagtttgatggcaatgttgctatactagccccatcacttcaataactactttcctacgttggtactaaccaaatcaggtcataagggtctgaacagttcatctcagccatatcattaggctcccctagtagttccttagtattcaattgcaaattaatcttagcaaacggtttcaacattttcaattattgttgctcagttgtattattatctttaaataataattctataattatatatatttgcgaaataaaaaagaccggaacatatcgagaattccccgatatattccaatctaaaagttacttatataactattggttagctatgcataaatggcttatgcagtaacccaatgtccagcgccaccagtgttatataattttactgctgcggcatcttgaacactttcaggagcatttgctggtgatacacctttgtatttagcaggtgcaactgaatcccaagttgattgtaagaattgatacttaccagctgcacctgatgttggatttacagcatgaatattgccacctgattcacgttgagcaatttgttttagatgagcattcacatttactgatgaaccttctgatgcttttgattcagttggtgttgcagtaacttgtgtattgtttgatgttgatgcttgtggttgttgagtttgagcattttgtggtgcttcaacttcttgtgattgtacttgattagcttgatcagctgatggtgcaacattattagttgcaggtgcttgtgcactcatgtctgctccattagcacctgttgcatggtaattccaagcaaagtgtgtaccatctgattcaaagtgataagtaaacccttcatagtcaaatgtataattataagcgccagcttcaattggtttttgatttaatgtttgatcatttgattgcgccatttgcgctaaagatgctttatttaagtccgcttcacttgcatgggcttcgtgacctgcatttcctgctacgattcctaaacctactgctaatgatgatgcgagtaatgttttcttcataatcttaaaatcctcctacaagtaatttgtttctctaaaagttttacagagactactgtaacatctgtaaaatccgtgcaggttacaacaaaataaaaaaatagccttgttttttacacagtgattacaacgaaatcccccataatttcagatatgattctatcgagaattgtcatgacagtaaaaatgtttttcatttgcaattttttatgtaatcgttttgcaatctatgtctattttctattagaaaaactacacaaaaagacgacctacacaacagtactagtcatgtaagtcgtttttaagtgagtatatttcaagttaattagatctataaaaaatttaggatggattaaatgtatattaaggatgtttaggataattggatttaaatttctaataagtcatgattatctatattttgagagtcaatatctaaaatactatctgagagaatttcattattttgggatttaggggacataaattttattgtttcaacatataattcagtgacaaagtgtgtttgtccgtctttatcatactttcttgatctcatttgaccagttataccaaccaatgtaccttgattagtatatttttctatattagaagctaacttgccaaatgctttacagaataagtaatcacagacgatttctccattttcatctttataatttcggtgcgttgcaacacaaaacgttgcaatttttctatcctccttttcaaatatttgtgcgtctttcgtcagtctcccgacaattacgattttatttagcatgtagtgtgtgattcacctcctatgcctatatcttaattactagcttaaaaatggtcaaaatggcaaattttatataattaatagctatagcatctcgttatttgttatatttaaagaaattagtcatgaaatgaccttaattcttctaattaattcaaaaatcataaatattaaactaatgggatgtgggaatatgaaaacttttaaagcagtaaggtttcaaattgtaaatgaacacggcagaattatagaatatgaattagaagatggcgtaataattaataaagaggaaagtggcacgggttggttgcttgaaattgtcatttctaatgagcattatgaaacatttaaggaatatcaagacaatgaacagttattggatattcgtgtcgtcatcacgcgtccagccaatgatccagctttatttgaatctactgtgaaaagtattaaaaattttaaaacaacaatgtctatcgtatttgaatgtcatatttacactttacgtcaacagtatgctgaaagtttattagaacaacttattgatgatggattatctggtgaagaattaaaaaaatcatttaatcgaatgatgcagtctaaaccaaagttaaaggatgaaaaattagaagagtaaaataaaaaacattcaaagattatgccaacacattaaatctttgaatgttttttgttttattttacatcttgaattgcaaatgtaagttcacaactacaagcaagttgaccatcgacagtagctttagcattacctttaccgattggtcctttaattttagtgatttctacttccaatgttaaagtatcaccaggtactacttgacgtttaaaacgacatttatcaataccagcaaataaagcgattttacctttattttcttcactatttaaaatagctaccgcacctgtttgagctaacgcttcagtaattaatacgcctggcattaccgcatactcaggaaaatgcccttgaaagaatggttcgtttcctgatacttgtttaatagccacacaacgttgaccttcttcatattcaactactttatcaattaataaaaatggctgtctgtgaggtataatttgtttaatttggttataatcaaaaattgtttccatggttgaaatcctccattatattaatttactgaattaatcgttaatacgttcaatgtctgcacctaattgcttcaatttgccatgtaagtcaacatatcctctatctaaatgattcaattcagtgacacttgttttaccatcagcaactaatccagctaaaattaaggctgctgctgctcttaaatcagtcgctttaacttgcgcaccttgcaattgacttttgccttcaagttttgcactgcgaccttcaacattgatattcgcgttcatacgtttgaactctgcaacatgcataaaacgattttcaaatacagtttcagttactactttatgtccatttgctgttaataataatgccatcatttgtgactgcatatcggttgggaaaccaggatgcggtaatgttttgatgtcaacaggctgtaaatctccttcagctcttacacgaatgccgtcttcttgatagtccaattcaacgcccatttcttctaatttatacactaaactagccatatgttctttgattgcaccacgtacaaaaatatcgccacgagtaatggcaccagcgattagtaatgtgcctgcttcaattctatctggaatgatagcatgttctacaccatgtaatgattctacaccattgattgtaattgtgtctgtaccagcaccagtaattctaccgcccatttcattaatgtaatttgctaaatcgacaatttcaggttctttagctgcattttcaattaaagtcttacccttagctaatgatgctgccataataatattttgtgttgctcctacacttggaaaatctaaatgaattgatgtaccttttaatccatctttagcattagcataaatattaccattttcaagatgaatttctgcgcctaaagcttcaaaacctttaatgtgttgctcaatcggtctacttccaattgcacaaccaccaggcaatgcaacaatagcatgtcctagtcttgctaaaagaggtcccataactaaaatacttgcacgcattttactaacatattcatatggtgcctcttcatttagagtctttgttgcatcaacgacaacagcgttttcgtcctttttgtatgtaacgtcagcatttaaggttgttaatacattatttattgtttctacatcacttaaagctggaacattaactaatttactcggtttatcagaagctaataaagatgctgtcaatattggtaatactgcatttttagcaccttctactttaacttcacccgttaatttatttccacctttgattactattttatccatcgtaaatcctccacttagaactcctattactttacatttccctattttaaaattattttaagtcattatttaattatatctagttttgattacaaatcatagagttagacttattttattaaatattttacctgcgtcgagtattgtaacaaatctacaataaaattgcttactgcagtgcctaataaaatagcaacaaatatcatacacacttgtaattgagtggcgtatccttttttaaaaaattgatctaatctaattgattgtaaagcccaataggcaatacaaatacatacaacatgtaacactaaatggataactgcaaattgtccgatataatccattttatcacctcataagattactgtattacattgtacatgaaaaatttaaataatgatacaaagtttaatacccgtttttagtaaagtttaagctaacttactatataattctttttacataaatatcataactataaagtatcttggcatgaaaaaatgtagctactttcaaaaaatgaaatgtcgactgtagatagtggtgaaaagaaattttgattttagcaatctattagtgattgtaaaaagtaaaactattcttgagagtcggacataaatcaatgtctagactctatagtgttatatttggcagtagttgacggggccccaacatagagaatttcgaaaaagaaattctacaaacaatgcaagttggggtgggacaacgaaataaattttgtaaaaatataatttctgtcccactccctcctatttttaaatacacattagctgtgtttaatgacaaagaaccactacatcataaatctttaatggctctttatcaattcctcccgccctctcatgctttgtatctttaaatcaatataattcaaaaaagggtcgaagatatgtaatcacatcttcgaccctttatttactattttaattcagccacacgcaaacggttatttgctctctctaaagctctttcggctctatgaatatcagtattgtcgtcatcattttccaagtgagactctgctcttgctttggctaatttagctctttcaacatcaatttctcttgcagtttctgcagtctgaacaattattgaaactttatcttttctaacttcaacaaagccatcgcttacagcaatatattcagttccatcgtgaaattccacttttacaaagcctgtttttaaagcagctacagttggaatatgtccactcatgacacctatctcaccagctgttgtttgcataacaacgagttcaacattatcacgattgtaaacagaaccattaggagtgacaatatctaggtttaatgtattcattatccattcctcctaattgttatacttcaacacccatatctttagcttttgcaataacatcatccatgctaccaactaaacggaatgcatcttctggaatatggtcatatttaccatctaagatatctttaaagtttgcaactgttgtcttaacaggtacataagaacctttttgaccagtaaattgttccgctacgtggaagttttgagataagaagaattgaattctacgtgcgcgttcaactgtttgtttatcttcatcagataattcgtccatacctaagatagcaatgatatcttgtaattcacggtatttttgaagtgttgattgtacatcacgagctacttcataatgttcttgacctacaattgatggttccaatgctcttgatgtagacgctaatggatccacggctggataaatacccatttcagttaatttacgttctaagtttgtagttgcatctaaatgggcaaacgctgtcgctggcgctgggtcagtatagtcatcggcaggtacgaataccgcttgaatagaagtaactgatccttttgttgtagacgtaatacgttcttgtaattgtcccatttcagtagcaagtgttggttggtaacctactgcagaaggcatacgacctaataatgcagatacctcagaaccagcttgtgtaaatctgaaaatgttatcgatgaataataatacgtcttgaccttgttcatcacggaaatattcagccattgttaaaccagataatgcaacacgcatacgtgcaccaggtggctcattcatttgcccgaataccatggctgttttcttaattacaccactgtcactcatttcgaagtataaatcgttaccttcacgagtacgttcacctacaccggcgaatacagaaataccaccgtgctcttgagcgatgttgttaattaattcttggattaatactgttttacctacaccggcaccaccgaacaatccgattttaccacctttaatataaggtgctagtaaatctactactttaatacctgtttctaaaatttgaacttctgttgaaagttcatcgaatgctggtgcttgacgatggataggatcgcggcgaacagaatcactaatttcttctttaaggtcaattgtttcacctagtacattaaatacacgacctaatgtttcgtcaccaacaggtacactaatttctttgcctgtatcttttacatccatgcctctttggacaccatcagttgaatccatcgcaattgtacgaacaacgtcgtcacctaattgcagcgcaacttctaatgttagttgtattgtaccttcttctttaggcacatcaataaccaaggcgttattaattttaggaacttcgttatgttcaaatcgaacatcaattacaggacccataacttgagttacacggccaattcccatgctattttcctcctttaaatattattcaagcgctgcggaaccaccaacaatttcagtaatttgttgcgtaatttctgcttgtctcgctctgttatattctaatgataagtcatcaataagttcagttgcattatcagtggcatttttcatcgcagtcatacgtgttgcatgctcacttgcttttgcgtctaatattgttccgtaaatcaaactctcaacatattgaggcaagattacacttaagatagattctttatctggctcaaattcataagaagacaaatgaccatgtcccttactagaatcctcttgagataatggtaatacttgtctagatgtaggcttgttttcaagaacgctgacataatgactatagtatatatttaattcatcaatttcttcttcactgtataagtctatagcatggttagctagtgcttgaacagatttgaaagaaggttgatcaggtacgtctacttgagaatactcaatgtcataacctctattttttaggaaatcaacaccttgttgccctaaaactacaatactgtattcgctactatcttgatgtttcgcttcaatatcagtaatcaattttttaagcacgtttgcactatatgcacctgctaaacctttatcactcgtgataactaaatatccacttctagtaattttacgaggtcttagcattggatggtttgtattgctacttgcccctgcaactgcagtaattgcatcttgcattttatccatatatggtgtgaattgttttgtatttttttcagctctacgaagttttgaacttgataccatgttcatcgctttcgtaatctgcttcatttttttggttgattttattcgagtatctatttctttaagagaagccactatctcaccaccttatactaaacttgtttattattcagatttgctaaagctttttttgaattcgttaattgctgtgtcaaacttctcagcatctggtaagccaccagtttctctgatttcatttaacagttcagtagcatttgattctgcccagtggtttaactcgtcttcaaaacgtgtgatatctacaactggaatatcatctaaatatccttttgttaatgcataaataatcaacacttggtgttcaactggtaatggtttgttttgatcttgttttaagacttcaacagtacgtttaccacgttctaatttacttgcagtaaattcatcaaggtctgaaccgaattgtgcaaatgattcaagttctctgtatgacgctaagtcaagacgtaacgtaccagcaactttcttcattgctttaatttgtgcagatccaccaacacgagatacagattgtccggcattaatcgctggtcttacacctgagaagaataaatcagattgtaagaagatttgtccatctgtaattgaaataacgtttgttggtacataagctgaaatatcaccagcttgtgtttcgataattggtaatgcagtaattgaaccgccacctaagtcatcgtttaattttgctgctctttctaataatctactatgtaagtagaatacgtcacctgggtatgcttcacgacctggaggtctacgtaataataatgataactcacgataagctgctgcttgtttagttaaatcatcataaacgattaaaacatgtttaccgttaaacatgaattcttcacccattgttacacctgaatatggtgcaatatataataatggagaaggttcagaagctgatgctgctacaacaatagtgtagtctaaagcgcctgcttgtcttaacttttcaacatttgctcttactgttgaatctttttgaccaatagcaacatagatacaaatcgtaccttgatctttttggttcaaaattgtgtcaattgcaattgttgttttacctgtttgacggtcaccgatgatcaactcacgttgacctctaccaattggtactaaagcatcaattgctttgatacctgtttgtaatggctcatctactgatttacgatccattacaccagtagcttttttctctactggacgtgttttagttgtgttaatcggtccttgtccatcaataggttgtcctaatggattaacaactcttccgattagttcttcacctactggtacttccatgatacgaccagtacgtttaacttcgtcaccttcagtaatacctgtgtatggtcctaaaataaccacacccacgtttgactcttcaaggttttgggctaaaccaagtacgccgttatggaattctactagctcaccagccataacgtcatttaatccgtgaattaatgcaataccatcaccaatttgtaatacagtacctacatcagttacggacatttctgactcataattttcaatttgtgagcgaagtaatgcactgatttcttcagcttttatggccatctatgtcactcctctttataattaattaactcttctaaattttctttgtaaatggacaagatcatttctaacactaccatctaatacagttgtgccgactttaactctaaatccaccaattaaatctggattaatttttgtatctacaataactttagataacttcgtttgttgagttactagtttgacaatcttatctaactcttcttgactcaattcatatgttgactcaattgttgcaaaatcttgattgtagtgtccgttatataagctttggaacgccttgaatacgtcagctattaatgagatatgtctattatctgctaacacgtacatcatatttttaatgtatggattaatgtcagtaaatacaccattaatcaactcacgacgttgttctgctgtttgagttggattactgtcaaccattttcaattgctcaattttatcttttactgcttcatttataactgttaattcttcattaatagtttctaaattatttgtatctaatgacacgtcaaataatgctttagcatacttgttagctacttttaccattatttatcgcctgcctcttttagatacttgtcaaccaatgctttttggtcttgttcagaaatttcttttctaagaactttagaagcaattaacactgatagttcagatacttgattattaatatctgcaatggcacgttctttttggctattgatttcactttgtgctgtttcaatcataccgtttgcacgtacgtttgcttcatgaataatttgttcttgctgttgacgtgcttgaaccttagcatcttctaatatcttttgaacttcttcttgtgtttctttaagtttttgtttattttcttcttcaagtttctgtgcatttaacttagcttgttctgcgtcatcgatatctctgttaatatctctttcacgtttatccattacatctttcaatggaccccatgcgaactttttaagtaacgcaagtaacacgatgaaagttaggacctgtacaatcacagtaccccactcaacgcctccagctgcaccaagaacgaataagttagctgtttcagtcacgggttcatgacactcctttcattaaaataatcgctagtgttatatagaaaaaaacgacgaggttaggacctactgaatttatgcgataggcatggtgcgttcatatctcaactatttaataaagttcaaagatattacaatatatgcatcatgaattatgtcctatgcgctttgtcccgacctcttttatctgttaattatccagcaaatgtcatgaatgcaattactacaccgatgataggtaatgcctcaactaaacctacaccaatgaacatgatacccattaattgaccacgtgcttctggttgacgtgctacaccttcaactgttcttgaaacgattaaaccgttaccgatacctgctcctaatgctgataaaccaattgcgattgctgctgcgattaaattcataatttaatttcctcctgtgattgtatataattattgaaatttttagtgttcatctgccactttatgtgacatataaaccatcgaaagcataataaagatatatgcttggattgttcctacaaatattgaaaatgcttgccaaacaattaatcctgggatactaataatccaaccccatgctggttcgttaaagaataagccagcaagtaatgttaatagtatctcacctgcaaatatgttaccgtacaaacgcagaccaagcgttaatgttgaagtgaactcttcaaaaacattaataattgccaatggccaaaacggctgtacataacctttaagatattgtttcgtaccacgcattttaattccataaaagtgagttaacagtattatcgttgtagacaacgttaaagtcactgttgcatcagctgttggtgatttccaccacaatgtgtgatctttcgttactatagaaaacggaagacctaacatattagctataaaaatgtacagaatcagcgttactgctaagaagtggaattgaccaccttttttccaagccatgttaccttcaatgattcccctcacgaaatcaaaaatccattcaacgaaattttgtttgccagttggtctttttttcaaattacgcgtacaaatgatagcaagtagaaaaacaagaaacgccgtaacaagtatcatcaatatacttgataaattgaaaacgatatcaaaaccgaataaattccaactcacgagcggggatttgtgatccataatctcacctctttcttaatttatttgctcacctttagtaaaggacgtatgataactacaacatatgaaatcattaaaccaataattataccgattatacttacatgcgctttattaaagtaccaaatcatacaggcaataattgcaactaagtatcgccacatatttccagttgaaatatgcatagtgtctggtcttttagctttggctaagtagctctcaaatataacagtattgattgcagaaccagtaacaccaatgattaatcctaagataaatgcatggtgtgtataaaggtataatcctcccaatattattattagataaaaataatattgaatgaactgtttaaaaatgttgtagaaacgactcattttatatgcctccgtgtgactgatatcaatcatgaaaaccgttccactcatacaaactaaatgataatataggcgatttgtggtgtcaattctattcaaattgttgtaaaaaaataagcatagttagacacaatttagacacaattagacaaaaagtctatttttctcagaaatcgcttggtttttcagtgattaaattcaaataatacttaatatgattaactattctttccgaagcaaatccatcaccgtaaggattagatgcttcagacatttgatgatataatctctcatcatcgattaattcttttgcagcttgatacacattttgcttatttgttccaatgacttttaatgtgccagcttcaacaccttcaggacgttctgtaacgcttcgcaaaactaaaactggcttattaaatgatggcgcttcttcctgaattccacctgaatctgtcaaaataaaataagcttttttagcaaaattatggaaatctactacgtccaaaggttcaatcaattcaattctgtcatgactacctaaaatcttttgagccacctctcgaactttcgggtttttatgcattggatatactagtgctaaatcagtatactcatctattaagcgtctaaccgctttaaatatattttccatgggttgcccgatattttctcgtcggtgtgctgtcataagaatgaattttttgtcatggtatttatccatgatgttagatttataattgtcatcaactgtatatttcatagcatcaatcgctgtattaccagtgacaacaacactttctgaatatttcccttcacttaacaaatgcgatgcagcatttttagtaggtgcaaaatgtaagtcagctaatacaccaactaattgtctattcacctcttccggaaaaggtgaatatttatcataacttctaagccctgcttcaacgtgtccaatcggcacttggttataaaatgccgctaaaccacctgcaaatgtcgtcatcgtatcaccatgtacaagtaccatgtctggtttttctaattgaatcacttgttctaattgagtgattgatttagaagttatctcagaaagtgtctgtcctgatttcataatattcaaatcgtattttggtttgatttcaaaggtacttaatactgaatcaagcatttctctatgctgtgctgtaacaacaacaattggctcgagcattttttcttgttccaaagctttaactaaaggagccatctttatggcttcgggtcttgttccaaatatggtcataatctttttcatcaaactacttatctccgattcttctatttagtaccaaacaatctatctccagcgtcgcctaaccctggtgtgatatatgctttgtcatttagcttttcatcaagtgcagcaatataaatatctacatctggatgtgcctcatgcatcttttctacgccttctggtgctgcaattaaacacatgaagcgaatatttttagcgccacgtttcttcaatgaagtaatagcttcaattgctgatgcgcctgttgctaacataggatcaacaacaatgatttgtctttcagtaatatcttgaggtaacttagcaaaatactctacagcctttaatgtttcgggatctcgatacaaaccgatatgtccaactcttgctgcaggtactaaacttaaaataccatcagtcatacctaaaccagctcttaaaattggaacgatagctaattttttaccagctaatcgtttagccgtcattttagttacaggcgtttcaatatcaacatcctgaagctctaagtctctagttacttcatatgccatcaacataccaacttcgtctacaagttctctaaattctttagtacctgtatttacatctctaatatagcttagtttgtgttgaattaatggatgatcgaaaacgtgtactttactcataaaaattactcctatctttgtgtatgtttattgatatagaggatattcagctgttaatttcgcaacgcgttctttagcttgttgtaatttttcttcatctttactatttttcaatgctaaactgatgatttttgcaacttcctcaaaagctttttcatcaaatccacgcgttgttgcagcaggtgtacctaaacgtataccactcgttacaaaaggtttttcttgatcgaacggaatggtatttttgttacatgtgataccaactgaatctaaagtctcttcagcttctttaccagtaagtcctatagacccttttacatcaacagctactaagtgattatctgtaccgccagaaacaattctaaatccttcattaattaatgcttctgcaagaacttttgcgtttttaaccacttgttgttgatacgttttgaaattattttctaacgcttctccaaaagcaactgcttttgctgcaataacatgctcaagaggtccaccttgaataccagggaaaattgttttatctatgtcttttttatattcttccttacataaaatcataccaccacgtggtccgcgtaatgttttgtgtgtagtagttgttacaaaatcagcatattctactggatttggatgtaaacctgccgctactaatcctgcaatatgtgccatgtctaccattaacttagcgtttacttcatctgcgatttctttaaactttttgaagtcaattgttcttgaatatgctgatgctcctgccacaataagcttaggcttatgctctaacgctaatttacgaacttcatcataattgattcgttctgtgtctttatctactccatattcaacgaaattgtagaatttaccactaaaattaacaggcgctccatgtgtcaagtgaccaccatgactcaaattcatacctaaaactgtgtcgcccatttctaatgcaactaagtaaacagccatgttcgcttgtgaacctgaatgtggttgaacattgacatgttcagctccaaacaatgctttagcacgatcaattgcgatgctttcagtaacatctacaaactcacagccaccataatatcggcgtcctggatagccttcagcatacttattagtcaacactgaaccttgtgcttccataaccgcttccgatacaaaattttccgatgcgattaactctatgttgctattttgtctctgaaattctctctcgattgcttctgcgataactttatcttgcttggtgatataagacataaaatctccccttctttcaaaaaaacttattggtatttagcacgttcgccaccaatctttttcggcctagatgtggcaatagttacaattgcctgtcctacttgctttactgaggtccttacaggtacacatacatgtttaatatgcatgcctattaatgtttgaccaatatcaattccacaaggaacagtaatatgttcgaccacgatcggatccttcatatgctgaaaagcgtatgttgccaaactccctccagcatgtacatctggaacgacggaaacttcttccattgttaatggattaaactgagatttttctattgttatcgctctgttgatatgttcacatccttgaaaagcaaaagtaacgcctgtctctttactcacaacatctaatgcattaaaaatagtttctgcaacttccatcgaaccgacagtccctattttttcgccaatgacttccgatgttgaacatccaattaaacatatatctcctttattaaaaaaggacatatcttttaattcgtctaataacattgtcaaatctttcataaaagcccacccttcctaaaaataaaaaaggaatatagcaaagtgctacactcctctattataacttatttaactgttaacatatactaattatacagaattcctactagcaaataatatcttttaattttaaaattaaacttacaagttcttcataggtatgtacatacatttcttttgttccgccgtatggatctataacttctcctgcttcttttacatattcatgcaatgtgaaaacatgattttgcaaaccaaagtgtgcctctattaattctttgtgcgaatacgacatcgtcaaaataatatctgctttcaaatctgcttcagtaaattgttgcgataaggtcgtttcagctaaatgatgttcttcaactaagtcttcaacataattcgaaacaccttgattgttcacagcgaatatacctcttgattcaaattgatgatttggcataacctcttttgcaatactttccgctaatgggctacgacatgtgttacctgtacaaacgaatagaaccttcatagttcacaccctttaataatgtgattacctgcagcttttaacatgcgattcataattgcttctgtattatcattcagctcaaagccgtatatatacgccgctgaaatattttcattttcatcaagtgaatgtaacacatcataaagattatgacttgcttgtttaacatcattgtcatcctgacataattgaataaattgcgcttcacttggtataaacgccaccttattactcggcacaataaaagctatagaagaccaatctttaccgtcatttccaattttgctctcaatatctgtaataattgtaagcggtgtattgggtgagtaatgcttatatttcatacctggtgcaattggctgttcagtatcattataatcagcatgggcgatactattcggaagtatatctgtaatcattgctgctgttatagaaccaggtcttgcaattttataaggaaaagatgtgcaatctaaaaccgtactttctaatccttcttcactttgttcagcttgaacgataccatcgatacggccattcaaatcttgatatacatgattgaaagttgttggtgaaggtctaccacttaaattagcacttggagcagctagaggttcatttatgatttgtaataattgtctacctacagaatggcttggcattctaacagcaactgatgataaacctccagaaacttttcgacatagatagcctggctttaacggcaatataaacgaaatagggcccggccagaatgcctgcattaacttttctacgcgtggatccaaagtatatgtaaaatcttttaattgaactttactgtgtatatgaacaataagcggattgtcagatggacggcctttagcttcatatattttagctacagcttcttcatctgtcgcatttgctgcaagtccataaactgtttcagttggcaaacctattaaaccaccgtttaaaacaatgtcttttatttcattaattttaggatattgctgtaaatcttcattatattctctaacatcccaaattttagtatccaacttaatcacgcctttcttatttatcataatacaaagtaaaaagctatgcacttaactaatcatagcaaaggcataacttttaattaccatttaaatgagacgattcgatcgtggccatttatatctttaataatgtcgatttttttgtcaggaaatttattcaaaattattgatttaagtgcctcaccttgattgtaaccaatttcaaaaacaactgggctgcctttttccataacgtgaggtaaatcttcaatgattgattcataaatagcatatccatggttatctgcaaacaatgcctgatgtggttcgaatctcgtaaccgttggagacatcgtaaccatatctttttcatctatataaggtggattagatatcaagccgttcaacttgataccttctttaattaagggctttaatgcatcccctgttaaaaactgtatttgcgattgatgcttctcagcattattacgagccatattcattgcttcaagtgaaatatcagtagcaataacatttaaatccggcttttcacatttcaaagtaattgcaagtacaccgctacccgttccgatatctacgattgttgcatcatcttctaactgttgtaagaaatgcaacattacttcttcagtttcaggtcttggtatcaaacaatttgagtttacatcaaacgttctaccataaaatgaggcaaagccaactatatactgtatgggctctcctaataacatacgttgtaatgctaagtcgaacttcataatcatcgctttcggcatatcatcatgcatgtgaactacaaagtccgtacgcgtccattgaaatacatctaacattaaccattcagctcgtgtttgttcaaaccctttttgttgtgttaaatgaattgcttcatctaacttttctttataattcaccattattaagttctttcaatttatctgtctgctctgataaagtcagtgcatctataatttcttctaaatggccttccataatttgccctaatttttgaagcgttagacctatacggtggtctgttacacggctttgtggataattataagttcgaatacgttctgaacgatcaccagtaccgactgctgatttacgttgtgacgcatacttttgttgttcttcttgaactttcatatcgtataaacgtgcttttaacactttcattgctttttcacggttttgaatttgagacttctcagaagatgttgcaatgacacccgttggtaaatgggtaatacgtactgcagagtcagttgtgtttacgtgctgaccacctgcaccacttgaacgatacgtgtcgatttttaaatcttcatttctaatttcaatttctacatcttcaacttctggtaaaactgccactgtagctgttgaagtatgaatacgtccacctgattctgtttcaggcacacgttgaacgcggtgcgcaccattttcaaatttcaatttactatacgcaccattaccagaaactgagaaactaatttctttgtaaccaccatggtcactttcagacgcttctactatttcagttttgaatccttgtgattcagcatactttgaatacatacgcattaaatcaccagcaaaaatcgcagcctcatcaccaccagctgctgctctgatttctacaataacgtctttgtcatcattaggatctttaggaatcaataatattttaagctcttcttcaagatttggaagttcagctttaataccgctactttcctcttttaacatttctacttcttctttatcatcagtttcacttaacatttcttcaatatcagctaattcttctttttttgctttatagttacgataaacatctacagttttttgtaaatcagcttgctctttagaatatttacgtaatttatctgaatcatttacaacatctgggtcacttaacagttcatttaactgttcgtatctttcttctacaatatctaattgatcaaacacttataattcctccttattattatcactaggtgctacgatatggtgcgcgcgacaacgtggctcataactttcattggcacctactaagataatcggatcatcgattttagctggtttaccatttattaatcgttgcgttctactagatgaagaaccacaaacagcacaaactgcttgaagtttcgttacttgttcactgacagccatcaatttaggcattggttcgaacggttcgcccctaaaatccatatctaatccagcaacaataacacggtgtccatctgctgatagtttttctactatacttacaatttcatcgtcaaaaaattgcacttcgtctattcctataacatcaacattagttaagtcgtgcgtcataatttcacttgctttagaaatattaatcgcttcaatggcattaccattatgagagaccactttttctttatgatatcgatcatcaatcgccggtttaaatacaacgactttttgtttagcgtatatgccccttcttaaacgtcttataagttcttcggatttaccgctaaacatactacctgtaatacattctatccaaccggaatggtaagtttcatacattgagagttccacctttttcaaaacataatcgctttattatatcatatttcaaatattcataaatgtctttttcataattatatcgatattgtacatgaacaattattttataaatttgtcttgcatatttatatacagctattctaatttgttccttcttattcgtgcgatttttctactcaatacaaactttaataaagggggaatttatcattatgtattaacaacatggtattgagtcacttctttgaacacagtcgtaagtatatacccttactacgcttataaataaaaaagctgtctacaattccattattggatgcagacagcttaacgattactatattagttgtttgatttaagaccaaactttttgttgaaacgttccacacgtccatccgcagcagcgaatttttgacgtccagtgtagaatggatgtgaatcagatgaaatatctaaacgaataactgggtattcttttccatcttcccactccatcatttctgaagatgtttttgtagaaccgcttaagaatttgaagtttgtagtagtatctaaaaagattacttggtgatactcaggatgaattccttgtttcattattttcagctcctttgccctgaaccatctggaacagagttatttgtgagtttttacccaatactgtgtaattataaaggtaattaattcaaaacgcaagcccctatataatgtttattaaattataggtcgacccgttttagtactttcttctgcagacttttgtagctgcttgaagaaatcttcattattcttagactttttaagtttgcgaataaatctttcagtaaagtctgttgagtcagtgaatagatttcttaattgccataatgtgtctaattcagatttacttatcaacaattcttctttacgcgttgaacttctgccaatatcaattgcagggaagatacgacgttcagacaatttacgatctaaatgtaactccatgttacctgttcctttaaattcttcgtaaatcatatcgtccatacgtgaacccgtatcaactaatgcagttgcaagtattgttaaacttccacctgcttcaatatttctcgctgcaccgaagaatgcttttggtttgtgtaaagatgcaggatctaaaccacctgataatgtacgaccacttggtggaataactaagttataagcgcgtgctaatctcgttatagaatccattaaaataatgacatcttccccaatttctactaaacgctttgcacgttcaagtaataattcagctactttaacatggtgttctggtggttcgtcaaacgttgaatgaacgacttcagcagcttctactgagcgttctaaatctgttacctcttcaggacgctcgccaactaacaaaataaatagctttgcatctggtttgttcgtactgattgcattcgctatctcttttaataacgatgttttacctgctttaggtggcgccactattaaaccacgttgacctaaaccaatcggtgttactaaatccatgatgcgcgttgaataattttgtgtttctgtctctaatttaatacgctcatctggataaagtggtgtcaaagcttggaaatgcggacgtttcttcacttcttctgcgttatgatcattaacaaagtcaacttgtaataagccataatatttttcgttatctttaggttttctaactttcccagttacttcatccccacgtttaatttcaaaacgacgaatttggctagcagatatataaatatctttttcccctttagaatagttcactgttcttaaaaaaccataaccatctggttgtatatcatctaagataccttccatataatagttaccatctttttccatttgtgcttccataatagctagaacaagttcttttttatttaatttactatagttcgtcaacttaagagttttagctttttgagtgagttccttggtagtatagttcttgtacaattcgtggaatgattcatactgaggagatgtacgttctctttcaggcatatagtttacacccatttcattattttttagttagtaagtaatagataggcatgacaatgcataaataactgtgctagcacaatcccattatgctaatccccaaccttttaaatacatgaataactatagcaaatttttattttaattacaaaatctatttataaaaattgcaaaattaaaacagtacacaaaacttaattagtcatgtgcactgttttattgcgatttttaattcaaaaatcaaatttatttaaaatagccagctatagatttcacttctaaaaactcttcaataccataatcgccccattcacgacctaaaccagattgtttatagccaccaaatggtaagtctggctttctacctgcttcgtttatttctactgtacctgcttcaatagaacgagctactttatgcaatgtttctttgtcattaccaataacatatcctgccaaaccatattttgtatcatttgcaatttgaatcgcttcatctaaatcgttataagtgataactgacattactggcccaaaaatttcttcttgtgctatcgtcatttgattatctacattaataaaaattgtcggacgtgcaaagtatcctttttcaagtccttctggtttaccaggaccaccataaaataattcagcaccttcttcaatacctttattaatataattttgtacttgatcaaattgttttttactaatgatagggcctacttgtgtaccatcttctcttggattaccgacacgcacttggctaaattgttcttttaattcagctaagaatgcatctttaattttgttaggcactaaaacacgtgtaccagctgtacatacttgaccagtattattaacaactttgcctgttgttgctttagccgcttctttaatatctacgtcatctaggacgatgtatggtgatttgccaccaagctctaatgatacctttttaaagtctttagcagctttttccataattttagaaccagtagggcctgatcctgtaaatgacatcatgcgtactttaggatgttcagataaaggattcccaacgccagcaccatcaccattaacaaggttaaatacacctttaggaacaccgactttatcaaaaatctcagctaaaataacagctgcaaatggtgtttcttcagatggtttaagtacaactggactaccagccgcaaatgctgctgctaattttaatgatgtttggtttgtagggaagttccacggtgtaattaagccagatacaccgatagcttctttaacaactaaatcatctccgcggcgttcttcaaattcgtagttatccaatgcatctctcgctgcaacaaaatggtttagtcccatttgataatggacacgctcagataatgataaaggagcacctaactcatccgtaatagcttgtacaatatcgtcttttctgttttcatattcttttacaattttatctaataacgcttgtctttctttcactgatgtatgacggaactctaaataaacattgtctgccgcctcgacggctttatcaacatcagctttattacctttagcaactttcccgattacttcttcggttgctggatttataacttctatcgtttcattactattactttctacccattcgccattaatgtattgctttgtgtagtctctcattattctttcactcctcaagaatgatttatatattatttatccgtaatgcacacgatataaacattacattccattatgatacgctcccttttaatatgttcaaaataaaatgctttaaaattttgctgcatctaatttttttatatttttaaataaaaataactattcccacatcatcgcaaataatgcgaagacttagaaatagttataatcaatgctatatttaaacgtcatgtaattatttagcagtacgttgatctgttaaatcgacatatgattgcgcccatgcttcaattggatgtaaagcctctgctaacgctttacctttttcagttagcacataaataatttgtactggactcgtagaaatgatttgcttctcaactaactcccattgtgcaagctctgacaacttaagactcaaagcacgcggcgttattgttttcaaatctcttttcatatcggaaaagtgtgctgaacagtcattacatcttgagagataattaatgattaatccattccaacttctaccaagtattttaaaagtttcttcgagatacggacatacttccatcatcttcacctctcatcaataaatttagaatgtaaacgaacacccttttttaatcagtataattattataccacaaaacaagataaatctatacagtttccgtccaaatatctgcacctaaagcttttaaatgttctacaatatctgtataacctctataaatatgtttaacattgtaaattgtagttacaccctcagcaattaaaccagcaataattaaacaagctcctgctcttaaatcgctagcataaacttcagcaccatgtaatgttgatggttttatcgttgctgtgccttcgtcaacttcaatatttgcacccatgcgctttaattcttcaacatgtttaaaacgctccggataaatcgtatcagttacaaatgaaggaccatttgccataaataataatggtgtaataggctgttgcaaatcagtagcaaaacctggatatactagtgttttaatatcaacaaattgatatggtgcattattattgatgcgaattctttcgtctcttacatcaacattcacacctaattcactaaatttagcagttaatgtttctacatgtttcggaacaatattatttaatataacattttctccacatgctgcagcgatacacatatatgtgcctgcttcaattctatcaggtataacttgatactcagaaccatgtaattctttaacaccattgattttaattgttgatgtacccgctcccttaatattagctcccatacttgttaagaagttagcaacatcaactacttccggttctttagcagcattttcaattacagtttgtcctgttgcataaactgcagctagcataatgttaattgttgcacctacgctaaccatatctagaaaaatatgtgcaccttttaactctttagcttcaattttcattgatgtcgtacttgattcatcaatttcagcacctaaagctttaaatcctttaatatgttgatcaattggacgtggcccaagcggacatcctcccggtaaaccaatcacacattttttaaatctacctaacatggcacccatcatatagtatgaagcacgtaatgattcaactttattatttggtaatgcagcattttgtatttcagttgtatcaacttctaattccgtaccatttagtgaagccttaatatttaaatcttctaataaactcactaaagttttaacatcagagatttgcggtaacccttctaatttcacatgtccttgagctaataatgttgcaggaatgatagctacagcactgtttttcgcgccactgatattaacttccccatttagtgtgcgtccacctcttatttttattacctcttgagccatatcatttatctcctttgtccattactttttaattttttgcattattagcattataaattaattttactttatttgtaaaatagtttattttaatcgttaaaatcttgtctttctattttcgatcgattaataacaaatcattcacctttactaatatatgctgttcttccccacttgaccatggtctaaagtctgattattcaactaaatattgacgttgttttgacaattatttagttttaattctacgatttgcacgtaaacttttttcataaattgctcatttcccttataattatatcacaatcaattttggtatattttaccatttttacgctttcactttaaaatcaaactgttttatttattacttatacaacataaaaaagaagcaaacaccattttgtctgcttcttttaaaattaatatccctacgttattaataacttaaagactaaatattaattatttagcgcggtttgaagtaccgaactctttaattttacctttaactgtttctttgatagcttcacgagcaggtcctaagtatttacgaggatcgtaaacttctttgtcgttatttaaaacgtcacgaactgcttttgctgaagcgatttggttttcagtgtttacgttaattttagctgtaccaaatggaattgctttttggatatctttagttgggataccagtaccaccgtgcaatactaatggtaaaccagtagataaaccgatttcttccatttctttaaatcctaattttggttcacctttgtatggaccatgaactgaacctaatgctggcgctaatgcatcgataccagttttttcaactagttcttgacattctttaggatcagcataaatgatgccatctgctacaacatcatcttcttgtccgccaacagtacctaattcagcttctacagaaacacctttttcatgagcgtattcaacaacttttttagttgttgcaacgttttcttcgaatgggctgtgtgatgcatcgatcattactgatgtgaaaccagcatcgatagcttctttacatttttcaaagcttgaaccatggtctaaatggattgctacaggaatagtgatgtttaagtcatgcattaacccttcaaccattttaacaattgtgtagaaaccgctcatgtaacgagcagcaccttcagaaacacctaaaattacaggtgcattttcttcttgtgacgcttctaaaattgcttgagtgaattctaggttattaatattgtattgacctaccgcataaccattttcttttgcatcaattaacatttctttcattgaaactaaaggcatgaaagttcctccttgagtgcttacgcacgtatttttcaaagtaattatatcaaaaaaatagcgtcaatgcattgaaatactgcagattaaatgtgtattttttgaaaaattcgatagttatactaaatgcaaacgtatacatttttatacaatttaagccgttgcataatatgtagtcattaattacaatattttataagtagattggaggataaagatgtcaaaaatcttaaacacacaactgataggtatctttaatagattagaaaaacaatctttagaaattcaaatggccgcgcaatgtttaattcaagcaattggtggcgaaggttatgtttatgtaaaaggttacgatgatttacagtttttcgaaagtttcattctacatagtgatgagcgtttaaaatctagccgaaaacttgacgctattaaagacttcaaagaaattgactcaactgatcgtgtattattattcgcaccattttataatgatcaagttgcattagatattcaaaaacttatcgacttagatatcgatgtggtcttaataagcaacaaacctaaaacagatgatttccctgatcatctcgtacattttatcgatttatctacaccaagacctatagtctatactgaagattacgataagattgtccagccacatgcgatggcattgaattatgtatactatgacatttatacacaaatgattgaaatgacaagagacttagaattataaaagtcactattgttatttaataccttgtcactaacataatattaaaattatacgaaaaaccggtactttcaatgtttaacaatgaaagtaccggttttattagcaaatttatttattttgttgatattttaatgaagcttcaataaatgatttaaaaatcgggtgcggacgatttggtctagataagaattctgggtggaattgacaagcaataaagaaatcatttgtcggaatctctaccatttctactaaacgtccatctggacttgtaccagaaatcaccataccattcgcttctaattgttctctatagtcattattaaattcataacgatgacgatgtctttcttcaatttccgctttaccataaacatcttgtgccaatgtgccttctttaattgaacatggatataagcctaagcgtaatgtaccacctaaatcttcgatatctttttgttctggtaataaatctataattgggtatggtgttgcagggtctaattcagctgaatgtgcgccttcaaggcctaatacgtttcttgaaaattcaactgttgcaagttgcattcctaaacaaataccaaagaatggtacattgttttctcgagcatacttaattgcactaattttaccttcacttgcacggaaaccaaatccacctggtactaaaataccgtcgacatctgcaaggtattcggccgcattttcatctgtaacttcacttgaatcaatccatctaatatcaatatctttagcgaaaggatatccggcatgttttaatgattcaactacagataagtatgcatcttgtaagctaacatacttaccaactaaaccaattgtaattttaccatctaaattattaacgatatctaacaactgtttccattcatcaagctgtgtttcatatttcgcgtttaattgtaaacgtttaataacgatatcatccatattttgttggcttaattgtaatgggatttcgtataaagagtctgcatcacgacattcaataacactttctttattaatgtcacagaataatgcaattttatcttttaaatcttgtgtcatttcatattcagttcttacaacgattaagtctggttgaatacctaagcctcgtaattctttaacactatgttgtgttggcttcgttttcatttctccagcagctttaatataaggtaatagtgtacagtgaacatacataacgttttctctacctaaatcactgcgaatttggcgaatcgcttcaataaacggtaatgactcaatatcacctgttgtaccgccaatttcagtgataacaacgtctgcattagtactttcccctgcaagtaataaacgttctttaatttcatttgtaatatgcggaataacttgaactgttccgcctaagtaatcaccacgacgttcttttttcaatacgtgtgaatacactttaccggctgttacatttgaaaacttgtttaaattaatatcaataaatctttcgtaatgtcctaagtctaggtcagtttctgcaccatcatccgttacgaatacttcaccatgttgataaggactcattgtacctgggtcaacatttaagtatggatcgaatttttgaattgttacatttagacctctatcttttaataatctacctagagaagatgctgtaatacccttccctaatgatgaaactacgccacctgttacaaaaataaattttgtcatgtcctgacctcctaattattaaagggaatgcttcctcatcgtttgtaaaaataacgtaaaacataacattaaagtaagctcattcaagttgtttatttgtcgaattcgacaaaattaaattctgtttacttaccgtttccatactgctatgtcactatgtatatcatttacaactttgattattgcgttatcatttcttgatttactcaattaaataaaaaaacgctccctctcacaaattttgtaaggggagcgtataaattttatacacgtgtcctatttaaaggagcccgaataaaattttatcatctttcaactaaaagtcaaacaaaaaattatgctttgaagtcttcttcgtcttcaaaatcttcttcgtcttcatctagttcatcttcatcttcttcaatgactatatccgaatgattgatttcttcttcaacttgctcatcttcaggatcatttaattcttcttgatcatcagtttgagctggaatatcgtcatcatcatccatttcatcttcacccaataattttaagttttgatcttcttcatcatcggcgtctaaaatatcaaatttttgaattgttggtgcaattttctcttcgatatcatctactgagtaccagtcacgtaatccccataagttttcaccaacatttaaaaaacgtccatctgtatttaaatctgtgtaaaattgtacaacacgagtttcaatttcctcatactcataatcacctaatgctctaaattcatcgatgatatcatataagttcattgtttcacctttatcattcaataatgtataagccatatcaataaatgatttttcatcaaccatttgttttgtataatcttgaattttcattgcccaatacttcctttcgaaggatataatctaaatttatacgtctgaattcatttatatatagtaacaaaactaaattataaatgacaatatcatatttcgcaatcactgttagtaatttaaatatttttcgaaaacgacataatcatcagtttgttcgatttcaacgaaattactatttagacataatggtttaaaatcattattctctccaaacagaatcatcgtaatcacattaaggttgtcatagttttttcttaagtaagtaggcaattgtcgaagtgcacttgaaccaataccattaaagcgatatgatttatccacttcaatagcagcaatgttcatgcgttcaccaatctgctccaatgcgataaagccaaccttttggccatcaatcattaaattaatgatatgtacattggtcacttctgaacgactttcttcttcaagctttaatgacgaaacatgttttgaatctaagtccaagtaatataatcgttctttgccaattggcccttcttctttagtcgctgtatgcatgaatccagcacgttcgtataggttccaagcattgtcattttccgcatctactactagatatagatgattaaaatcaggaaatacaccttgaacatattgcggcaatgacatcattattttcgtgccatatccaaaaccttgatatttttcattaatcgataatgaacgaatataaacgacattttcaggtgtatcataaccttcatgctgatagtaacgatgtaatacaaaaaagcccaccacttcatttttgtcgtttattgctacgttagcaatcctatcagcatcattaattgcatcatcaataacttctttaggtaaagatgaatatatttgttgtctttcattcaagtcaaaatcattaattgctgaacgatattgttcatcaaatgcttttaaagtgataccttcaaaacaaagttctttagccatatatttaacccctatctttttatatatgaagcatgaatccccatattattttacctattatttcactacgataccattatttactctaagttaaataaattacttatttatattttttaagttttaaaattaatgtgctattcctcattacttatcattttaatcagaaacttacaaatacactgcgtacgaactacttttaatattacgtcactaattaaaaatcctatacaacttcaaaattcctagaaaataatatatataacttaacgtccacgtttgtaatgcattaattgcgatacgcttacaatgttgaaatacaatggcatcaaatttgttaataattactattattacttgttttttagtcattttactatactattatttaaggatagacattaataatgaggtgggaatcttatgaaagttggcattgacgcgggcggtacactaattaaaatcgttcaagagcaagataaccaacgtacttttaaaactgaattaactaaaaatattgatcaagttgtggaatggttaaaccaacagcaaattgaaaaattatgcttaactggaggtaatgcaggtgttattgctgaaaacatcaacattcctgcacaaatttttgtagagtttgatgctgcatctcaaggactaggtattttgttaaaagagcaaggccatgacttagcagattatatttttgcaaatgttggtaccggtacgtcactacattatttcgacggccaatcacaacgtcgtgtaggcggtattggtacaggtggtggcatgattcaaggactcggttatttactaagtcaaatcactgattataaacagttaactgacatggcacaacacggagatcgtaacactatcgatttaaaggttagacatatttataaagataccgaaccacccattcccggtgatttaacagcagctaattttggtcatgtactacatcatttagatgctgattttacacctagcaataaattagcagccgttattggtgtcgttggcgaagttgttacgacaatggccattactgttgcacgtgaatttaaaactgaaaatatcgtttatatcggttcttcatttcataataacgctttattacgcaaagttgtggaagattatactgtgttacgcggttgcaaaccgtactatgttgaaaacggcgcattttcaggtgctattggtgcattatatttaggaaaatagaaaaagaccatttatatgagcgttgttttaaataagcgctatataaatggccttttattttatggtctacatgttttgaatacgtattgttccatttattatcacttagttacttacaactcaattcaattaaaatgtaagttcattagacaatttttgcgctgaaacaattgtaccaaccacgccagtttttaaatctatcgcaacagctttatgatcatctctaagttcatctagccattctccaaaaacagaaccttcaatcgtaattaaatcacactcttcaaaatcttcatctcgaacttttaacgctctgtttttaatactccatacaggcataatatgcggctttttttcgtcgctatcattttcactaatgagaataaactgcttactaccttttttagttaagccgtatacttcgtcatattttgctacatcttggacaaattctttgattctaattttatctaattccgtcatcacttcttgtgtaacagctacaacgtttagaagatgcccttcttcttccattgtttgattcataataatatggtcttgctcatcaaacaattcatctaattcataagtagcaaaacgatcaacgtccattttcacaactttatcaaatggaatatcacgacttgttaaaaatgatacggccacactttcttctgtccaaacgcctacatacgcttcacttttataatttaggcgtactagttttttatttttagaggcgaaataaatacattcatttattaatatatctctaaagaatggatatgctttataagacatgcttgaccctcactttttaaaatatgtcatacataaaatagtaaatgactccaacaagatagtcaattagacatattatgaattcaatttaatgtcatgtttttcattttaaaaattcaatagcattaaattttacgtatacacaaattcggtctataacacgaaacatatctagttactaaaaaattcaaaaagataacctttaatatacctttatcaacaaaacggcaactcttataacatagtgaaataaaagtcgccatttaatattagtattacaaagtattgccatatcataaatttaattactgttgactagaatcgaaaaaaacttgttacaagtgcatattcagtcaactactggcaacataacatcgtagcgccttatgttccgaactctaatagtgttcaagttcagctaaaaatgcgcgttcattctctagtactgtttcttttgaatctccatgccaaatacagccaaaccttgatttaactttatcttcaccgtaccaatcaccatcataataagataacgggtataaactaccttctttgacatatttcaaaatcgtattgaagaaatgtgtgttatcaccttttgaatgataactataaaacttttgatatcctgaattcaattcattagcaagtaataacatgctagttgaaccattttgtctaaagtttaaatcaatcgcataaacgttatcatcctcatcgacgagtaagtcaaaaccagccacaccaaagaatccttgattcacaccgttttccataatttgtctacctgcttctataacgtgctctggtacattagtagtattttcatttccgttataaaatccgtacttatccgttaattgcgttgccgcaccaagatattgaatacctagcgattccgagtatgcaaactgaacgcaataattcgctttttcttcaatcttctgttcgataataagcgaattcgtttcagcagttgcctctttaatacgcgttatcgctttttgtaaatctgcatcatgataacaaatcataacgccatagccacctgctgtcggaagatcatctcccggcttaattacaaacgggaattcccaattcttaatctcgttttcgaattgctcaatttttacaacttttctttttggtaaaaacttcccatttgtccattcaggtattcttgctttattatttaaagcaacaaataacgttttatctaatgcataatattgctgattcaagattgtttcatcatgaatatattgaaaataaatctttttattttccttatgtgccaattgtttgatcaagttttcgtaagattgctgattgttaaatgtataagttgagttcggtacatccttaccaataacttgaaataacttatgcaatttgtctgtcgcactagcttcgtgaacaataacaggtaattgatttgctattaataactccctaccagttaaaaaattagattgatgttcgtccggtttcaaccatggattcgatatatacgaaggtcttgacgtatagacaacatctttgtcatataaatcacttaacgttaagttcggctcattaccattatttgtcattacttcccattccctttcaaatgcgcatgctcttcaataatgtcttgataaacgtcttgatttgtaattaactctaaccccatcaacgccattattttagcacctttaattaatgcttcatcaccatgtacactcgcagctgcttctctaaatctatgtgtatgccctactaaattacgtgatccaattttaatatgaggatgtattgttggcacaacatgacttacgttccctgtatccgtagagccataaccaaaatcatcatcaataactacttcaccaacttcttcagcatatttagcaaataaatcatctaatttcggcgttttaatgaattcattcacaccgttttgaattggaccaaattcataatcacaaccagtctgtatcgcagctccacgtgcgatttgatttactttttctgttaatatatccaattctttacgcgtcattgctctagtataaaaacgagcatgtgtatagtctggaataatattagctgctttcccgccatctaaaatcacaccatgcacacgttgaccttttttaatatgttgtcgtagttgtgctacaccattaaaataactaatcatagcgtctaatgcatttaatgcttcatctgcattttcagaggcatgagcactttttccgtaaaatttaacatctaaaacatccactgccaaagtatcaatcgttttataagtttcatttcccggatgaatcattaaggcaatgtcgatttgatcaatcacgccagctttaacataagaggctttagcgctcccattctcgccaccttcttcagctggacatccaagcacaactactttaccaccaatttggtcaatcacttgcttcaaaccaattgcaccaagcacacttgcagttccaatgatattatgaccacaagcatgacccaatcctggcaatgcatcgtattctgctaaaaaacctatagctggcccgtcaagacccgaatcatatgtcgctataaacccagttgcatgcccagcaatctcggtttcaatttcaaaatcatgttctttcaaacgatctattaaagttcgagacgcaaatatttcttcattaccaagttcaggacgttcatgaattctatgactaatttcgatataactatatttatttgtttctatataatcgagaatttgttgtttttcactcattttttactatctcccttttaccctgcattcattttaatcatccacaatattttgttctttcaaaatgaattattacttattctatcggttttatctcatgatgtcatctaatttttctttatttacaaaattttctaataactaaaagcctttcataaatttataaaacagtttcaaattgtaaaacataagccctattgttacaatttaagtattgttagaaacgcaacttgcaacaaatttaagtttaataatgtaatgaatcattcgcgttttatagttttgagtagttaataggaggaaatttaaaatgacaaaaatgaatgttgaaagtttcaatttagatcatactaaagtggttgccccatttattagattagcgggaacgatggaaggattaaacggagatgtcattcacaaatatgacattcgtttcaaacaaccaaacaaagaacatatggatatgcctggattgcattcattagaacatttaatggctgaaaatattagaaatcatagtgacaaagtcgttgatttaagtcctatgggttgccaaactggtttctatgtatcatttattaatcatgataattatgatgatgtattaaatattgttgaagcaactttaaatgatgtgctaaatgctactgaagtgcctgcttgtaatgaagtacaatgtggctgggcagcaagtcattcattagaaggtgctaaaactatcgctcaagcatttctagacaaacgaaacgaatggcatgatgttttcggtacaggaaaataaagcttagtcaatcaagttaatcagaaaagcagtcgaacaatgatgttacaatcgccattgtccaactgctttttattatgcttcaaaatcaaaaaatcgaacaaatgaaaaagtaaaatctttaacatttgtccgatttatttaagaaccactataatttcttaattagtcccattaacacgaactgcataggtaaccttaaatatagttgccatgttggcaattgtttatctcctaaaggtaactttttaactgccatatagatattagctgggaatacagctagcaagaatagattgattgtatttttcaagcattgagatggtcttttaattaaaagtgcaagcccaaataatatctcaaagattcctgtaacaagaaccgctgtttttcgaagcggcaaacatttcggtatgatatttctaaattgtcgttctcgtgtaaaatgcaatacacctattacactaaaacctattcctaataaatatcttagtatgttcaatcagcttcaactcctactctgtaatgattttatgaattaatgtaggcgatacaacatgatcagcaattgttatgcttgaatctaattttttaacaacatcgtctacatcttggcgattactgtgaatcgttaataatgattctccttcttctactttatcaccaatttttttatttaaaacaataccaaccgctaaatcaatatcatcctcttttgttaaacgtcccgctcctaacatcatcgaagcaacacctatatcgttagagactaactcagtcacataacctgattttttagctttatattcgatttgatattgagcttgtggcaaacgctctggatggtcaataactgtttcgtcgccaccttggtttttaataaatgttttgaatttttctaatgctgcacctgaatcaattgcctcaattagcaatgccctcgcttcttcaagcgtttcagctttgtttgcaagtacaaccatttgagaacctaatgttaatacaagttctgttaaatctttcggaccttgtcctttcaacgtatcaattgcttcttgtaactcaagcgcattgccaatcgcacgaccaagtggctgattcatatcagaaataatcgccatcgtattacgtcccacattattaccaatacgtaccattgcgtgcgctaatgcttcagcatcttctaatgttttcataaatgcaccgctaccagtttttacatctaatacaattgcatctgcaccagcagcaatctttttactcataattgaagaggcaattaatggtattgaattgacagtaccagtaacatcccttaaggcatataattttttatctgcaggagttaaatttcctgattgtcctacaactgccactttattttcattaaccaatttcacaaatgtcgcttcatctatttcaacatgaaaaccatcaattgcttctaatttatcaatcgtaccacctgtatgacctaatccacgcccactcatttttgcaacaggaacatctacagctgctactaatggtgctaaaaccaaagtagttgtatctcctacaccacctgttgagtgcttatctactttgacacctttaatatcactcaaatctatcatatcaccagaattaaccatagccatcgttaatgctgcacgctcatcatcattcatatcttggaaataaatcgccattgctaaacttgatgcttggtaatcaggaatatcccctttaacatagccgtcaataaagaaattaatttcttccgttgttagtgtatgaccgtcacgctttttctcaataatgtctatcattctcatttttatcatccttttcttaaaaagcttaggacaaagcatctgcgctttctctagtccattttttaaaagcacaagcgaaaattattatagcaagctatcgatttcatttttaatatcacaatttcaatgcgatgttattattcttaaatagattggttataacgtcaaagtccctattaaattatcttagaatcatcatggcatttatgatgtcttaaagttgatatcgacatacttatatatggttacgatgtcccatgcttagatattttttataaaattagtaatctgaatctgcttctaaaccttgcataatttgaacgcctgcgctcgcaccaatacgtgtcgcacctgcttcaaccattttattgaaatcttctaaattacgtacaccacctgatgcttttacttctacatcagcacctacagtatctttcattaatttaacgtcttctgcagtcgcaccgccacctgcaaaacctgttgaagttttaacgaagtccgcaccagccgcttttgttaattcactggcttttacgatttcgtcatggtccaacaataccgtctcaataatcacttttactgtgtgacctttcgcagctttaacgactgcttcaatgtcttgttgtacatcatcaaaacgcccatcttttaatgcgccgatgttgatgaccatgtcaatttcatctgcaccattttgaattgcatcttctgtttcaaatgctttcgttgccgttgtcgacgcacctaatgggaatcctattaccgtacaaactagcacacctgaatcagctagtcgctctgctgcatatttaacatgcgttggattcacacatacagatttaaaattgtatgctttcgcttcatcgatgatttgatcgatttgcgtacgtgttgactcaggcttcagtaaagtgtgatcaatcaattttgcactattcattttctatctcctcctttatggttgattataaaaatacggttgtaaattagttgattgagcgtcaggttcatttaaatatcaggttagatgtccgcttttatgtaaccgcatacatatactattacattaattcatttcccataaacaaacaatacaattgaacatgatatcttcattatgaacgatgacttgccaacaagctaatcaggattatatttttataattctttaattctatagtacaaaaattcgcaaaaaagggaaacaaatgttatcttaaaattattaatgaatattaaggagaagataacaaatgacaaaaggtacaccacatattcaaccaaatggagtaaaaattgctaaaacagtattaatgcctggcgatccgctacgcgcaaaatatattgctgataattttttagaaaatgttgaacaatttaacgatgtacgtaacatgtttggttacactggtacatataaaggtaaagaagtttctgtaatgggttctggtatgggtattccaagtattggtatttactcatatgagttatacaacttctttgatgtagatacaatcattcgtatcggttcttgtggcgcattacaagaaaatgttaacttatacgatgttattattgcacaagctgcatcaactaattcaaattatgtagatcaatacaatattccaggtcatttcgcgcctatcgctgacttcgagttagtaactaaagctaaaaatgtcgctgaccaaatcggtgctactacacacgtaggtaacgtattatcttctgatacattttacaatgccgatccaacattcaatgatgcttggaaaaaaatgggtattttaggtatcgaaatggaatcagctggtttatatttaaatgcgattcatgctggtaaaaaagcacttggtattttcacagtaagtgatcatattttacgtgacgaagctactacacctgaggaacgtcaaaattcatttacacaaatgatggaaatcgctttagaaatcgcagagtaacttatttaatttgactttaattgctctttaacaatgcgattaaactcaaaaagccaacacattctgggcgtatccccatttatgtgttggcttttatttatattattacttatctgtagattagcttaagtaagatttaaacatccaattatgtttatctactgatgtttgcatacctataaacatatcttctgatacatcatcgccagcattaccagcaatttcaatcgctttttctaattgttttgagatattagtgaaatcttgagataattcttcaaccatttgttctgcagagtaacctttcgcagcttctttaacaattgattgctctaagcattcagttaatgtacctacagggtttcctcctaccgctaaaattctttcagctaattcgtctacatattgacttgcttcattatataattcttcaaatttaacgtgtaatgagaagaagttaggtcctttcacataccagtggaaattatgtagctttgtataagctactgtccagtttgctacttgttgattcaattcttttacaacatcttgttgattactcatatttaatacactccttaaaattgtctacgtcttgcttgtttatattaattattatattataatgattctaatctgtaaagtgtttttactctcttttttataattattctaatctaattgcaaagtgtttcgctttttaaatgcctaaattttaatccatcatctagtatatctattatcaattagcaagtatgttttatcaatcagtaagttttactttcacattatcatctaaaaagaacgatttttcataatcatttggttggtgccatgttgttttccacattctatttctattattagcaaacattcgataaccgaaattacggactggtttaggtacaagccataaacctacgcccaataatttagttcgattaggtagtgctgtgattagttgaataatcgcctgcgattcaaaatatatatgatcacctttctgtaaaatcacactatttttatttgccgcttctggatgttgtttaaaaaattgttgtccaacttcaccttttaacgtggcaaattgataatttcttggtaggtcatgttgaattaaccaaatgacatagttataacaatatatacagtttccatcataatatacgattggcataatttattcgctccttcaatagtacttatagtcatttttcctaatttaaaaacatttaaacaaggttgtcacttgataagtcctcacgacacgaaattgccataaaatttatttttcagttttatatttattgtataatgtattttttatttactttaaacttctcattctacagtgtaatattatctcttattatcaacttagcgtttggtcattcgtcttattcaacataccactgaaaaactcatataaagttttaattcagtaacataaattcatttatattcatatactgtctttattatttattaaaataaaaacgagtaatctatcataagctcttaattagctcttatggttgattacccgtcattttttctttatacggttattcaaatatgcaattatgcaatttttaatcttatccttacttcttttcaaaaactaccatatatcattagtcatgtttgactttgactatacgtgtgtattttaaaaactgctctgaatatttctccttaatttcctctaaactgtcatatgtaataccaacaatatgccaattaggattgaaataatagaaagaatctttttgtcgtgaccatttaatcatattaccgtctttattataacgtggtaatgttacctcatagccttctaacacattaatatacgtttggaaaatgtctgtatctatacgattaaaattatcaataactaaataacttttatcctttttaggcattaattgagtaataaatccttcacgatagtataatgcccctgtttcatttggtaaatacttgccataaagcatatcttctgaaaaatcaggatgacctgttgttataacaggatttgcattcgctttttgcaataagtcattagccgcttttaagccttcttcttttcgatctacaacaagtaaaataaatggctttaacgcttcttctttttcactttcaagcatatctggtttttgaaccatttcaaatggagatttcaatccattattatcgctcatttcaataattgcatcatactgtgcttgtgacatacttgcaatagcctgttttgcattttcttgaaggaaatataagtttttcaatttaggatgcttatttaatgtacttaatgtaattggcgtaatatctttctcataagacacttcaatcactgtactatttgttctaccaggaattggtggtttttcatgaatatgctttgatacttctccaattccaacgacagattgatttttcgttcgattataaaaaataatattgtcgccttcttctaactgagtataaaaatgataaccattacgtttaataccgttgtacgtgtgcgtataaatcgtatattggtttccaggttcaaattcttcagtttcagctaaaaagaaataacgtggtatcttaatttcgcctttaccaagaccacttattaaatcaaactcttctgcagtgatttggttgaacaatgtctctttcatattactcatacgaaattccaaagcttcactacgctttaaataatctgctgttaatggtttcaattgttcattaaaacgaaactgtacacgtattttattttgtgcacctgtttcaacactaataatttcaccacatccaagtagtcccgtatccgtctgaacttgataaaagatgacttgatctcctactttagcctttttaaacgctctaaatccttgagatgggttaaaatgtgcgcctgattcaaataaagctgtttgtcctactaacggttcattatgattccaacggttatatccacaattcaaccaaaaataattcgtttctgctgtcatcttaatactccttaacctgaataaattttagaaacactatgaattacattcttttattgtttcttatgcagttgggcgcgtatgcgatcaactgtatcccctttgttcactgcgattttaatcgcatttcctataacattgtagcgcctaggacattaatttacgtcccagacccttatcgttttcacttctaagtaagtcgaactattttgctttacaacaagtgcgactctatatacagttggacacacacatacgagcaactgtataccttttaatcagttttctatattttatttattatatctgtcttaatgataaaaattgttacaaacagtttaacatatttagctacctattttgcatataaaaaacatgcttgcatacactatgcaataaaaattacaaatttatatatgataccactatgcttgcttatctctatagcgccattgatacacatttttaaatatctatactgccgttagaattttatcatgtcttaattttcattaaatattaattacttcattttatataaaccaacaaaaaccccctcactactatgcaagtgagaggttatgttgatgtgctttattttcatcaatgtcattaacacaatcatatttcttctgttaatgcactgtattatattcaaacgcgctatcgacaattaatttgaagctacaaaggtaccgcataatggcagcacattaattaacaatgcgctaaactttaatgaggcgctgatttgcttgtctttaaaagtcaacatagcactgataattcctaaaatagcaactatacgtggaattgtcatactcggatactgcggtatatgtaagaaagcaccaagacctgctatcacaccaaatactaacgcaatatatagaaattgcttcaaatcattcactcctaaattgttattacgctattacacatagctaatcatcaatgtgaaatcaccttcaaagacactatccaaatcttcagaagtcaaaataaagtttgtaccagtagtcagtttgaaaatttcaccatcgacaatcatttgcccttcaccttccaacactgtaactaaacagaactctctaggcttcatataatttaacgtgccagaaatttcccatttaaccaatgtaaagaaatcattcgatacaatgtgtgtacacttatggttttcaataatttcactttcaggcaaaatattaggtaatggtgcattgtactgaataacgtctaaagctttttcaatatttaacggtctatcattatattgattatcttgacgattgaaatcataaagtctatatgtaatgtctgacgattgcatcgtttcgtatgctaatattcctgaagaaatagtatgtactgttcctgctggaataaaatagaattctccaggttttactttaatatatctaagtatcgactctatcgttccgtgttgaacatgattcgcaacttcttctctagactctgctaatgtccctataactatttctgcatcttcttctgcatctataatataccaacattcagatttgccatattgcccattttcatgctcataagcataagaattatcagggtgcacatgaatagaaagtgattctcttgcatccactattttagttagaagcggaaaatctttgcttgggaaatcaccaaacaattcacgatgttctgaccaaatacggtctaatgtttgaccttgatatggtccattaataatctcgctcgtaccatttggatgtgctgacacacaccaacattccccagttgtatcattgtctaattgatatccaaactcacttagacgttgaccgccccataattttgtttttaaaattggttgtaaaaataatggcattgttgcacctccattgtgattaagtaagcaatagaactctgatgttgttgttccattatattttgattttgttctcatttacatcgtattataaacttccacatttcaaattaactattagtgattgtaccatatttactaatattgcagtactgccaattaaagcgcttcacttaaatttacagtactttaacatttttaaaaatttatagcatagagattatatctctcttacatttgtacatatttccctttaaatttactcgcccattataccaattaataaacaactttaatagttgtgccatacattgttcaaattctttgtaaaacgcatagacaatacgtacttattcatacttataatttatcattttcaaaaaaataacgagttacgaaaaagtaacccgcttcaaatcatatttactatccttattaatccttttcaatttcaaattgagttaaagcatctttaatgtcctgctcaccactaataatttgaaactcttggtgattaaaatgattggatgtgacaatttcttttaatactgtcgcaacatcttctctaggaatttcacctttaccatcaaaatattgtgcagcttctatctttccagatcctgctgcatttgtaagtgcccctggatgtaaaattgtataattcaaacctgaacgtcttaaatagtcatcagcgtaatgtttagcaattgtatatggctttaaatcaccgctatcatcaaaagcctgacgtctcgaatcatatgttgaaaccataacatagtgtttaatattagcctctttactcgcaatcattgatttaacagcaccatctaaatcgacaataattgttttatctgcacccgtatttcctccagaacctactgaaaagataactttatcgaatggtttaaacgtctcagttaaagtctctattgaatcattttcaacatcaacaagaattgctttcataccttgtgattttaacgcattaagttgatcggattgcctaacaccagcagtaaatggtacattttcttttgctaattgttgcactagtaacgaacctacaccgccattagcacctataaccaaaatattcatttacaacactctcctatttattattctctatgccataccactttatgagatatgtaaaacttgttacaactataaaaatcaattgacatactactgggaacgtattaaattaatatatgaacaaatattcatatgaagggattgtcatataatgtcagaacaatattcagaaataaatacagatacattagaacgcgtaactgaaattttcaaggcattaggcgattacaatcgaatacgtatcatggaattgttatcagtcagtgaagcaagtgttggtcacatttcacatcaattgaatttatctcaatcaaatgtctcgcaccaattaaaattacttaaaagtgtgcatcttgtgaaagcaaaacgacaaggccaatcaatgatttattcattagatgacatccacgtagcaactatgttaaagcaagccatacatcacgcgaatcatcctaaagaaagtgggttataatatgtctcattcacatcatcatgaccatatgcatagtcatgtaactacaaataataagaaagtattgtttatatcgtttttaataatcggtctatatatgtttatcgaaatcatcggcggtctccttgctaacagcttggcattactatctgacggtatccatatgtttagcgacacattctcattaggtgttgctttaatcgcatttatatatgcagaaaagaacgccacagctacgaaaacatttggttataaacgtttcgaagtactcgcagcgttatttaatggtgtaacgctttttgtaataagtattttgattgtttttgaagcgattaaacgcttctttgttccttctgaagttcaatcaaaagaaatgttaatcattagcattattggtttaattgtcaatatcgttgttgcattctttatgtttaaaggcggtgacacgtcacacaatttaaatatgcgtggcgcttttctacatgttatcggagacttattaggttcagttggcgccattactgcagctattttaatttgggcatttggatggacaatcgccgatcctatcgcaagtattttggtttccgttattattttaaaaagtgcttggggtatcacaaaatcttcaattaacattttaatggaaggcacaccaagtgatgttgatatagatgaagttataactactattaaaaaggattcacgaatacaaagtgtgcatgattgccatgtttggacaatttcaaatgatatgaatgcattaagttgtcatgttgttgtagaccatacattgacaatgaaagaatgtgaattattattagaaaacattgagcatgatttattacatttaaatatccaccatatgactattcaattagaaacgcctaatcacaaacatgatgaatcgatgatatgttcaggaacacatagtcattcacataaccatcatgctcatcatcacgcgcatgtacattaataattttaacctactgccattgcatcgattaaacttttcaatggcagtaggttttttatgtatttatggcgacttgtttggtctttgatgatgcaatgtttattaacacattttcaactattatttcttacattagtcatatttttgacaatttactattataattctctaactttagtcactttaattaatttttattagatattaatatgaaaataacgtgttttttgttattgtatttatatgaagaaaaggaggcaccactttgtttacttactttaaatcagcattaaaaaatgctaaaccacaattattaataacattgatatatgcacttatagcatttgctgtaattgcagttgtatatttacttgctaatttccagcttgctaagtatgtacaaactattgcaatttattcacaatttgggcaaaaaccaccaggagatgcatatttaaaagttatcgctgtattacttatagcagctgtagtttcactgttcgttttagttcaaatttttatcggaatcacaaatgttatgaaacgagcaatgagtcatgaaaaagtaaaatttaccgatttatttattgcatttaaaaaaggtatttatttaaagagcgttctgatcggtcttgtatctatagcaatgattatcgttctttcacttctgacatcattactatacaaattattttctccagtttcagaaatgattatgaattcagtacaatcatcatatgcagatagtacacacctgattggtattgctattacaactcaaagcatcataatcattgttgttttattgattaaagcaattattacttggttattgttaatacctgttttcaactttatgactagtttcgttgaatcaactaacgataaagtaaaaacacacttagctaatggatttaaagcaatgaaaaatggtcaaaaaacatttttcaaatttttcattggaatactattattaaacttaattattattttatttaaaacacctgttggttacttgatttcatttaatacgcaatcactctctcaaagtgttgcagaaaatatcataagagtttatacagtaatgacaatcattttattcgttgttattcatgcaatcattttaatgggtatcgttcaatattacttaaaacgtggtcaaaaaattactaaagataaagtaaaaacagctgacaagaacaaaaaagttgtcactgaaccaaaaaatacaaaagtagaaaatgataaagtgacaacatctgttgaaacaaaaacagaaaaagcacaagattcattaaatgataatacaacaaaaacgatgacttcagataaaccagaaaacaatcaaccaaaataaattttagagctccttacaactttagttgttaggggctcttatgcatgcgcttagcgcaggcgctcctactttttcaactttagttgttaggggctcttatgcagttgatgcatagcatccaactgtgttcctctatttttcaactttagtagctgataccgaaataacatggtgctaatttcatggcatgccgaaaaaatatatgaagaggtctgcagtgctttttatatagtccgtgattacattctatactttttattgttttttgttgtattgatagttggctttattatttctgattatgttcagaactacaattcataagaaaaatgtgttaaaatatatttgtagtaagtagaagcaaaagatgaaaatctttaactcttgaaacacaaaaagggcaacactcggaaacatgttaccctaatgagcccgttaaaaagacggtgaccttatattttatttaaaaatagccttcaaaaatgccggtcaaagcgaatagaaggttattttttatggtcttgagtactaatcaatactaaaccaatgattgttaatacaaccatcagcatttcaaaatcagacatgctagtcctttctaggagtaacaactataaccataggcatcacccctttattaagagattagccaccatctatcctacttgctcaataaatattataacatgcacacttttaaacagtaattcatagtataagttttttcatttcttaatcaactcgataaacagttgagtgacatacccttgtctaactagctatttcttcccctgttatcgtttgttcatcatataaaaatttaatttctcattttttattctctggtaaagaggggcgcccgctttttcggcctctcgctcttgttgctgctaagtctattttatacactcacatagtaaattaacttctaatcctgaaaaatgcactcatcatcgtaaaaaacattttgcccattgtgtctttcgttgaaatgttcatgttactaatttgtaagtcaattccgttatcatcgaatcattgtgataattcaattaatagttttgtcgttctacctaaccgatcaagttgatagacaactaatgtgtcgctctctcgtaaataatctaaacacttaacaagctctgtacgtttgacaccacttattctttcactatatacacacccacacccaaattctttaagtgtatcgatattaatctttcgttgatatggaaatgataatttaataatgtacacttttgattgtttaaacatgtacaatttttaaaaacctatagataattttattgaggtgaacaacaatgaaattatctttagacataaatactgattttgaagttactactcttacagatttaccaaaattaaaaattgttatggagaacttaaacatgaaaataaacaaaagtgaaatagcaagacacatgggtgttgatagaagaacagttgataaatatttaaatggctttgagccaaccaaaaagagaaatcgtcagtctattattgacaagtattaccctatcatagaaaaattactttcagacactagtgaacaaaagttctactataagcgtattctttggcaatatttgaaggataaacatgggttaacgtgtgcgtattctacatttagagcttatatccttaaacatgatgagtttaatcgttattttatgaaaggttatcaacggatgtcgcctaaaggcacaacgagattcgaaacaaaagccggtcatcaagcacagtttgactggaaagaaggcattaactttaaaacgaaggataatcaaatcgtttcactaaatataggcgtactactacttccttattcccgttttgtaatcatgcaagtgacaatgaataaatcaagtgatgtcttatttaatttattgacacaagcgtttgagctaatgggaggtgtgcctaatgaacttgtaacggataacatgaaaacggtcatggatcaacccagaacagaacgtacaaatggtcaaataaatcgtagatttaaacaattcgctgatgattttaattttaaagtaaaaccttgtgttgccggccgtcctagaacaaagggtaaagtagaatcgataatgaaaatattagatgaaattcatgcttatcaaggcgaattatatttggaagagattcctaagtttatttctaatcttaatgagcgactgaactactcagttcatacgagtacaggtaaaatacctattattgctttagaaaaagaaaaaagtttcttacaaccactaccgaatgtgaatgtaagaaactcatataaagtgaaacataaatatttgaaagtcaaccactctaatatgattacatataagtccaatcaatattcagtaccagctgaatattgtgggaaaatagttgaagttcaagtttatgatcaaaaactacacgtttattataacactaaatcgatttgtgaacatctcatcacacaacgtaaattaaattatcaaaaagaacattatttagaaacactgtcatcttcttttggaaatagagaaatggatgatattaatcagattgcgatagataatttgaatgcgattggagagttgtatgatgaataattcgacgaattataagcgcttaaaagcgaatttagaatatttgaaaatgaatcaaatgattaatcatcttgatgatgttatcgattttagtattaaaaacaacctgtcatttatagatacactaattaaattaagtgactacgaaatcgaaattaaagagaaaaatttgattgaatcgatggtaaaggtggcggcatttccgtttaaaaaagaaatatcagattttgactttaattttcaaccgagcatcaatcaacaagaaatttgggattttacagatttgcgttttatagaaaaatatcaaaacattgtctttttaggctcaagtggcgttggtaaaacacatttagctacaggcattggtatggctgcagctaaaaatagagtaagtacttactttattaaatgtcatcatttgatagagaatttaagaaaagcaaaactagagaacagattagaaaatagattgaagcactatagcaagtataagttattaatcatagatgagattgggtacttacctattggaagtgaagatgccaaactattctttcaattaatagatttaagatatgagaagaaaagtacaatatttaccacaaatatcaatttcaacttatggaatgaaatatttgatgatcccaaaatcgcaaatgcgattttggataggatattgcatcattcaagtgtagttaaaatcactggcaaatcgtatagattaaaagatcattcacctaagaaggaaattacttagcaaacaattttgtacattcttatacaatcatttatgtacatttttatattgacatttacacgttgatacacgatcataaccaattttagccatttaaataaaacctctcttcaacatattatattcagttatgactcaaaactcattgccgtatttttgattttgtattaatatatcaaggctatcatcatctaatatcaaatgaatttctccacttcgactatcaatagcaacgtttatttttgattctaactttttcaaataatctatgtcagtaattatgtacttagaaagatattcatcttcttttttaaattcttctttatcaattgtatatccgttctccaacatttttgataactctaaaagcgtattgctccaaccttctttttttacatatgaaactacatagtttatgaatttttcaatcaattgttcttccaaatcactataatcttgtgtatcctttttgaataattcaaatataatattattagataaatttttattatatattaatcgctcgtacataccagaagcgctagagttgataaatctattcagatcgttttgtatttcgttcaaatctatattccctttactatcgtaatatgaataattactcattaatttttttaagaaatctctcaaaccaaagtaaagataaatatttgaatactttctggcattatcgtagtcttttacatctcttttatagtgatctatcaacatattcaattcgaaattatatccatgattaaaatcaaactcgccattgtcatattttctttgaaattcaaacttgtatatttctgcaactttatcatcgcaattttcatctatatagttttcaaccaaataataagcacgctcaagagaaatttcaccataactttgtataaaagaggttaagtactctgttttctttaaaatttcttctcctttcttagttggtatatatacatatggtaagtctaagttatcaataatatgataattatcgtcaatacgtttaattaattcaggtttattacctgttgtttttataccaaaacttttttaaatactttgtaattcaggtcttgtctttttgtatatactaacttcaaaatcattagtcgttgataataacttagcttcaattaatttttttattgaatttataatttcaaaatcattattagcaagacatttattagcaaatatctcttctccaaccaatctatttacattagtgtgtaatactaataaatcacgtgcatttacgctcactaactttcatctcctcatttttgcttttcaaatttattaagtatgaataaaaaacatccgatcaaacaaaatctctatattctaattagatttatatagattatacactttaaaaatgattcttgatgcaaataaatgcgcctctcatagcataaaaactagtacgttttgaattttatgattcattgataatagtaccagttaaaagaattaagatcgtaattaccctcttaaaattcaagaatatattttcttaatctatcagcaagaggttatatgtaaaagtgttttttaataacatctaaaacgctttttcataataatgttaaatcattagaatttataatgattacaattaataaaaatagataaaatgaaataatgttccaaatacttattattatttatcataaattacgtgatgccctctacaacactaaatcaagaatgatatttattttatatactgtttccttacccacattatcctgtttagtcatatttaaaacactagtcttgaatgttatatttacaaaaaacactaaaacatttaaaaatagcactatttatttactttgttcttttatagcatcgtttatgtttattttcttgaattcagaaaatagtatggagatgataatttaatgtagatatatttgaagtatactttagtgtaaattgcattggcgaaattggtaaaagaactggttgattttatagtggagttacacttcatgaataacaagaactaaaacagtcaataggtgtgaatgttttcaaagacggctctgttgctactaaaaaaagaagcctacaattcaagagttagaccttaaaacaagaaatattattcaagctcaatgaattccctaccttattagttttaacaatatttattctcatagagtttatccaattaaatgtagatgattcaagtacttataatcatacaaaagagcaataagaaattttctaatagaaaataaccttactgctccttttcaatactaatctttatcttgtataaatttaatttcaatatacttaagatctattaatcagctaaaaaatgttttgctaaatattttgctgcgccatcctcttcattcgtatatgccgttacatctgaagttaaagcttggatttcaggacgtgcatttttcattgcgactgtgtaatggccaaattcaaacattgctctatcattatcactatcaccaatgactaacgtttcttcttgattgatgccaaaatgttcaatcatttctttaatgcctgtacctttatcagtttgataagccattgtttccgcattaaatcttgatgaatttgaaacactaatctgtagttgcacatgattttgctttaattcatctctaaatgctgttattttttctaaattagaactgaatagataaatttttgaatattcaccttcaggaaacttagttacccaatctatcttaccagcaagcgcatcttgtcttgaagaccattcactatgacttacgccattaataggatcttgactacgaatcatatctcgcatccatgtttcatcttcttttaaagaaactctattaccttcaaaaggaaatacctcataataaatttgttggcgcttagctaaattaataatttgttgcacttgagccaatgataaaccatgtttaaagataatttctccatctacttctccaatggttccatttgaactaatgatgccatttaccgcaaaatcttgaggtacaagttgctgtatttcagaatgcgaacgtccagtcgccaaaaatactttatatcctttctctctcaatcgattaatgacatctttcgtatacgttgatgcttgattattttcatgtaaaattgtaccatccatgtccaaaaatattgcttttacgttatccatattgccctccactgtcaattttagcttaattaaattttgtcattattagttagtatttgcaaaatatttactctaacattgccatagaaaatcgattattccatctttgaactgctacatttttctggaaaaatcgtgacatgttttcagatgtcaaaatatcatctattaacccttgttgtacactttccccatcttttaatagcaaaattttagtaaagtttccagtaatttcttcaataaagtgcgtcacataaatcatcgcaagcgttggatatgaatctgacaatgagtcaagtatacttaacaacgattctcgtgcaataaagtctaaaccagctgctggctcatctaaaattaaaacctggggttgccctattaaagctcgcgcaatcatcactcgttgtttttcacctgtagataaataaccgatatattgttgcgctttagcagacattccaactaatttaagtaattgatgtgcttcattacgtacctcatcatcaatatcttgataaacaccaattgatttaaaagcaccgcttatcaccacatcgattactctttcaccctcttgaaacttttccagtaaactatgagatacaaaacctatatgttgtcgtacagtctctgcagaataccctaccttgcctggcattttaccaaatagattaacatcgccagttgtcgcaggctcatatgcatttaatatatttaatagcgttgtcttaccagcaccatttaaaccatataaaatccatttgtcacctccattaatttgccaagaaatattttttaaaattgtttttccttgcttcattcgcccaacttgatctaattgaattaacatgcgaggtcacccctttattgcttctccatacttctcataaaatcatattaacataacacccttaattgtcagactatttaaataaataaactacttcatttttacgcatttctgccgacttaagatgaagtaaaagctaagtcgacctaaaaaagcacccttctagtcgattaatctaaaagggtgccatatactttaattttaatacatgattgattctaaaaaagtgaattattctacagtaactgatttagcaaggttacgtggtttatcaacatctaaatctctgtgtaatgctgcatagtatgaaattaattgtaatgtaacaactgatactaatggcgttaataattcatgtacatgaggaatgacataagtgtcgccttctttttcaagaccctccatagaaataatacatgggtgtgctccacgtgctactacctctttaacattaccacgaattgataaattaactttctcttgtgttgctaaacctacaactggtgtaccttcttcgattaaggcaattgtaccgtgtttaagttctccacctgcaaaaccttcagcttgaatgtaagagatttctttaagttttaacgcaccttctaaacttacgttatagtcaatagtacgtccgataaagaatgcattgcgtgttgtttctaagaaatctgtagcaatttgttccatgattggtgcatcgtcaacaatcgcttcaattgctgttgttacttttgctaattctctcaataaatcaatatctgcttcacgaccgtgctcttttgcaacgatttgagacaagattgataatactgcaatttgtgcagtatatgcttttgtagatgcaactgcgatttcaggacccgcgtgtaataacaatgtatggtctgcttcacgtgataaagttgaacctgcaacattagtgattgttaatgatttatgacctaatttattagtttcaactaatacggcacggctatctgcagtttcacctgattgagaaatataaacgaacaatggtttttcagataataatggcatgttgtagacaaactctgatgcaacgtgtacttcagttggtacgccagcccatttttctaaaaattctttacctactaaacctgcatggtagcttgtacctgctgcaataacgtaaatgcggtctgctgctttaacatcattgatgatgtcttgatcaattttcaagttaccttctgcatcttgatattcttgaataatacgacgcattactgctggttgttcatgaatttcttttaacatgtagtgtgcataaacacctttttcagcatctgatgcatcaatttcagcaatatatgaatcacgttctacaacgtttccatctgcatctttaataataacttcatcttttttaacaataacgatttcatggtcatggatttctttatattcgcttgtcacttgtaacattgcaagtgcgtctgatgcgataacattgaaaccttcaccaacacctaataataatggtgatttatttttagcaacatagattgtgtctttgtcttcagcatctaataaacctaatgcatatgaaccatgtaataatgacacaacttttgtaaatgcttcctcagttgaaagtccttgatttgaaaagtattcaactaattgaacgataacttctgtatctgtttctgaaatgaatgatacaccttgtaagtattcaccttttaactcttcatagttttcaataacaccgttatgaactagagtaaaacggccatttgatgattgatgtggatgagagttttcatgattcggtacaccgtgtgttgcccaacgtgtgtgaccgattccaacaggtccatcaaaatcgctactatcagcaactttacgtaattctgcaatacgacctttttctttaaatacagttgtattatcatcatttactactgcgatacctgcagagtcataacctctgtattctaatttttctaaaccttttaataataattctttggcattatcatagccaatataaccaacaattccacacataacgacattttcctccatattggaatagtacgcgtaaattatgatttattgccgataatttagattgacaatctgctttcataatataaataggaacatgctatcatcgcattcatccataacaaattaagcatagttatttttacaactatacaaattgctcacactgtactttccatattaatattttttatattcaatttctggcgatcttattaactttgtccattaagtcaccctaatgttttacttaataagctaacgaatgagccacatccgggatagcatccgccgatctattcgatcactatcctcctcgtctacaaatacatatattgcactctataaaggccactcatatattaacctttaatcttcaaatacaaatatttatttgcacaggcgctttaactgtactgccgaactttccccctttccattaatcattattgtacaacggtgttgttttgttttgcaaatattttcacaataaaattttaaaaatcctaaaacaatttttttgttttactttttcaaaatatctatactgtcacattgatgacactttatttaattttgtcacatttattttgacaaagttgatttttgtttatattgagtaacaagtaacggctctatacactatatatagtcacatatattaaaaaagaggtgtaaatatgtcacaaactgaagagaaaaaaggaattggtcgtcgtgttcaagcatttggatcattcttaagtagtatgatcatgccaaacattggcgctttcatcgcttggggttttatcgcggccatttttatagataatggatggttacctaacaaagatttagctactttagcaggaccaatgattacttatttaatcccattattgatcgcatttagtggtggtcgtttaatttatgatttacgtggtggtatcatcgcagcaacagcaactatgggtgtcatcgttgcattacctgatacaccaatgttacttggagctatgattatgggtcctttagttggttggttaatgaaaaagactgaccaattgatccaacctagaacaccacaaggttttgaaatgctatttaataatttttcagctggtattttaggatttatcatgacaattgcaggatttaaaattttagcaccacttatgaaatttatcatgcatattttatcagttgcagttgaagcattagtacatgctcacctacttccacttgtaagtattttagtagaacctgcaaaaattgtatttttaaacaatgcgattaaccatggtgtattcacaccacttggtgcagatcaagctgcaaaagctggtcaatctattttatacacaattgaatctaaccctggaccaggtttaggtatcttacttgcttatatgattttcggaaaaggtactgcaaaagcaacgtcatatggtgctggaatcatccacttcttcggtggtattcatgaaatttatttcccatatgtattaatgcgtcctttattattcatcgcagttattttaggtggtatgactggtgttgcaacttatcaagcaacaggatttggatttaaaagtcccgcgtcacctggttcatttatagtttactgtttaaatgcacctagaggcgaattcttgcacatgttactcggtgtcttccttgctgcacttgtatcattcgtcgtagcagctttaattatgaagttcactaaagaacctaaacaagatttagaagccgcaactgctcaaatggaaactactaaaggtaaaaaatctagtgttgcttctaagttagtatcttctgataaagatgcaaaagttgaagagaatgtaaatactgaagcaaaaacgaatgcggatgaatcatctacattagaggatgatcctgaagcgctattggataattacaacactgaagatgttgatgcacacaattacaataatataaatcatgttatttttgcctgcgatgcgggtatgggttctagtgcaatgggtgcaagcatgttacgtaataaatttaaaaaagcgggcattaatgatattacagttacaaatactgcgattaatcaattgccaaaagatgctcaattagttatcactcagaaaaaactaactgatcgtgctattaaacaaacaccaaatgccatccatatttcagtggataatttccttaattcaccaagatatgaagaacttttaaataatctaaaaaaagatgatcaagcataataattaaataaattaaaaaatggaggataccgccatgttattgagtacacgtgaaaaagaaatgatagccctattgattaagtaccacggtcaatatatcactatacacgacattgctcagcaacttgcggtgtcctctcgtactattcaccgtgaattaaaaggtgttgaagcatatttaacttcattttcattaactttagaacgcgcaaacaaaaaagggctacgcattgctggcgcagattctgatttaaacgatttgaagcaatcgatcgcacaacatcaaatcattgacttatctgttgaagagcagaaagtaattattatatacgctttgatacaagccaaggagccagttaaacaatatagtttagcgcaagaaattggcgtttctgtccagactttagcaaagatgttagatgatttagagctcgatttaaataagtaccaactatctttatctcgaaagcgtggcgaaggtatttacttggtaggtactgaatcaaagaaacgtgaatttttaagtcaattaatggtgaataacttaaatagtactagcgtttattcagtaattgaaaatcattttgtctttcattcattaaatcaaatccacaaagactttgttgacttagagcgtatttttaatgttgaaagactattaatggactacctaagtgccttaccctaccaacttaccgaatcaagttatttaactttaactgtccatatcgtgctatcaatttcacgtataaaaaatggagagtatgtcgcattaaacgatgatatttatgattctgtacaaaacacatttgaacacaaagtagcaagcgaacttgctgataaacttggtcaaatatatgacgtcacgtttaatcaggcagaaattgctttcattactatccatttacgtggtgctaaacgaaaaaatcttaatgatacatcattaaataatcgttgtgaagagaacaaaattaaagcgtttgttaaaaaagtagaaatgatttcaggtatgacatttgcagatttggatactttagtcgatggactgacgctacaccttaatcctgcaatcaatcgtttgcaagctaatatcgagacctataatccgttaacagacatgatcaagttcaaatatccaagactatttgaaaatgtaagattagctttaaatgattgttggcctgatttgatttttccagagagtgaaattgcttttatagttttacactttggtggctcgattaaaaaccaaggtaatcgatttttaaacatattagtcgtttgcagcagtggtatgggaactagccgtctattatcaactcgtctagagcaagtttttagtgagattgagcgtattacacaagcatcagtcagcgatttgaagtcactagatttaagtcaatatgatggcattatttctactgtgaatttagacatcgactccccctatttaacggtaaacccattattaccagatagtgatatcagttatgtcgcacagtttttaaatacaaagtctacgttccaagagacgcatgataaatcatcaaacatgattgataaggatgatgttcatgttgaaacgaaagatattgatggcaacacatcttttgaaaatgaacaaacttcatacttaacttcagttttcgaaaaacatttaagtgacgaaaaatcagaacaattaatgcatcatatgcgttcgggtttaactttgcttgattcagtgaaaatagttagtaccgaagttaaacagtggcaaacatatatcgcagattatctatatcaatgcgatgtaataaacgatccaacgtcattcgctgaactactagagcaacgattgattgacaatccaggatggatattaagtccatatcctgttgcaataccacacctaagagacaatatgattaaacaccctatgattctaatcacagttttagaagaaccgttaacattgcctagtattcaaaatgacaatcaaacaattaaatatatgatttctatgtttattcctgacaatgattttatggcatcactggtaagtgacttgtccgaatttttaagtttgaaattagaatctattgatacttttatggaaaatccacaggaacttgaaacattattaagaaacaaatttttagaacgaattaaaaaacaatttatttaggagtgtacaaaatgagcgaattatttagtaatgacaatatctttttaaatgtaaatgttaacagccaaaatgaagcaattgaaaaagcaggtaaagccttagttgatagtggtgctgtaacagatgcttatattcaagcaatgaaagatcgtgagcaagtcgtatcaacatttatgggaaatggcttggcaattcctcatggcacagatgaagctaaaacaaatgtgattcactcaggtttaacattattacaaatccctgaaggcgttgactgggatggcgaagtagttaaagttgtcgtgggaatcgctggtaaagatggcgaacatttagacttgttatctaaaattgcaattacatttagcgaagaagaaaatgtggatcgtatcgttcaagcaaaatctgcagaagaaattaaacaagtattcgaggaggcagatgcataatgaaagcagttcactttggtgctggtaacataggtcgtggtttcattggttatattcttgcagacaacaatgttaaagtaacatttgcagacgtcaatgaagaaatcattaatgctttagctactgatcatcaatacgatgttattttagctgatgagtctaaaacaacgacacgcgtgaataatgttgatgcaattaattcaatgcaaccttctgaagcgttgaaacaagcaattttagaagctgatattattacaacagctgttggtgttaacatactacctattattgctaaatcttttgcgcctttcttaaaagaaaaaacaaaccatgttaatattgttgcttgtgagaatgctattatggcaactgatacattgaaaaaagcggtacttgatattactggacctcttggtaacaatattcattttgctaactcagcagttgatagaattgtaccattacaaaagaatgaaaatatattagacgttatggttgagccattttacgaatgggttgttgaaaaagatgcatggtatggtccagaactaaatcatattaaatatgttgatgatttaacaccatatattgagcgtaaattattaactgtgaatacaggacatgcatatttagcgtatgctggtaaatttgcaggtaaagctaccgtattagacgctgtaaaagatagttcaattgaagctggcttacgccgtgttttagctgaaactagtcaatatattactaatgaatttgattttactgaagcggaacaagctggttatgttgaaaaaataatagaccgtttcaacaattcttatttatctgatgaagtaacacgtgttggacgaggtacgttacgtaaaattggccctaaagatagaattataaaaccattaacatatctttataataaagatttagaacgcactggtttattaaatacagctgcattgttattgaagtatgatgatacagcagaccaagaaactgttgagaaaaataattacattaaagaacacggtttaaaagcgttcttaagcgaatatgctaaagttgacgatggcttagccgatgaaataattgaagcttacaattcactttcataatttattgagctttgtttgaaactataattttccaacgttattcgttaacaatcagtaataatgtagtagttccgttgaattaacaatattaaatttctgaacataaaaaatactcccttcaacatagacacttaacttgtgttatgtatgaaaggagtatttttgcgttaataatttgttttattttcaagccacagccacctattcaatggctattggtcatttctaaaacaaattcatattaactgttagacttggttacttagtaaggaatatttccctatgaaataactagatgttcacattcttgaataaattttattcttcagtttgttggtctttcttagtgaatcttctaattaagaatgccatacctgcacctagagctaattcagcatatggtaaatcgtcattatgtgacataccagtatctggtaaagttttagcttgttgtttaggcttattaacttttccttgttgcgctgattttgcatttgttttgttttctttagtcttagttacattaagcatatcttgattagcactattgcttccatttgaaactgttgctaatgatgccttcatatcattagtttgcatatctttagctttattgtttgcagctgaaccaactgatgcttgcgtatcattagtatctgcttttaccgtatcatctgtttggctaacattagttgaagtcattttatcttttgcttcagaagatgcagatgttgatggtttattcgaaacttcagtatcagctttgcttggcgatttgactacttcgtttgatgtaacgttagtatcagaattgtgttgctcagcatctgtttgatttgtcgtactttcttctttatcttttgatgtattagaagatacttttggttctgttatgtctgctgaaggcaatgtttcagttgttgattcaaccatactttgatttgttgaatctctaccatctttttctgccttagctttattttcagattttggttgtgcaaccttgccattagttgattgagattcagcactattatttacttcagcattttgttttgaatcatttacagatgcattatctttgctatcagcagatgatgctgcacctgtgctcgcatttgttgttggagccgttgctgttgatcctgttggtgcgttctcgtttgttgcagttgtactattgttatttgttgtgctttctgctggcgttgcattatctgtttctgttgcaggtttatcagttgtgccgttattagttgattctacttctggtttatcagttgtaccattacccgttgccgaattgtctgttgatgcatctacactagaattgttattagcttgcggtttattatttgcatcatcagttgatggattgtttgttgatgttgctgttgttccaccagttgccgcatcattctgattatttgtcgttgttgaagacgtatctgcattggcattatctgttgactcagttacattaggttgtccattattttctggtgtttcattagcatttgaatttgctgttgtatcattattatctgaaccactattagtatcattagcatttggatcattctgaggcacaatcgcttcaattgcaggtatcgttacattttgtaattcagcaacttctgtatttgtttgtgttttatctaatttatcagcaaatctgtcaaaatatctacctaaatctgtacgtgcaatttctttcgccgatgcatctgcatctgcatttttaattatttctatttgcttgttaaccacttctctaattgcttccaaagcatttttcttaactactggattaatacgttgtgctttaagttgttcaagcgcactatttttgacagtagcgatttctgcatttgtagtttgatcagaaatatcttcagttgcttttgataaaatgtcttctaaagcattcgtaaacgcttctttttcttcagttgtagcatcagcgtcgacatttacacctgcttcaatctggtctagtgcagtttctaattcttcgatagctttttgtttttctgttgagtcaatttgaatgttatcaaatgcttcaagtccttgagctttcgctttttcaacttcggcagttgttgttgcatcagtaatgccttttttagcttgatctgtgatttgtttaatcattgccaatgcttcagttttttcttcagcagttaactggtcactttgatcaatagattctttcgtttcctctgctttagcatcaatcacttggttcgctttaggtttaacagtagcatctacttgaatagcatcaattgctgctttaccttgtgttaatgcatcatcaacgtcaccattatccacaccattattaatgctttctaatgcagtttgaacattttggtcaacttgcttaattgcttgttgcttttcatcctgtgttgcattagtgtcagctgaaatattatttttcttttgatctgcataagcatataaatctgttgtagctgtttcttttttaccggttggaattgtgtaatcgttaatattatctaagtcattatgaatttgaacttcaatgtcatctttagaagtagcttgattgacattttgatccgccgtttgtttcaattcagcaagtttttgtttcgcttctgcaatttcacttgaagtcgatgcgttagagttatccgcttcgtttacttttgaattatatgcagcttcaatcttagctaaagcatcttttttgtactcactaaatgttttaactgcattaattttagcttttccttctttaactgcattatcaacatattcatctgttgaagattggtcaatatttgttttcgcttgatttaattcagtatcaacttcttgttttgcatcgttaatttcttgttgtgatgcatttggtgtttgttctatttgtgttttcttatcagctgcagcttgatctaattcttttttacctgctggcttcttaacaggatttgcatgaagttgttgaactttttgtactgctgtatctttagcagtagttacatcacctgtagtagttgctgcattaatattatttaaaccttcttcatatgctgctctaactggtccaatatcgttacctttttcttcattagtagtctcattattattaagtatttcagttattttattttgcatttcagttagcaattccgctcttgcattcgttttaacatctgttgatgcttgaattgggtcaattgcttgaattgcattatcttttgcagtatttacatcatcgattgactgtgcattttcaatattttgattaccttgggttaattgtgcatctacttgttgatttgcttgttctttttcttcagtagtcgcatctgcagtttgtgcaataagcgctttttgttcgtttgcttttgttgctaattcatctttagctacatctttaattgttgtatctgcagtaataccttgaacatcagcaactgcttgatctttaatttgcgtaacatcgttagttgtttgtgcatttaagatatcttgatacgctttttctttagcttttaaaactaaatcttttgccgcatttttctcttcagttgtagcaccagttgtattatcaattgcttgattttgagttgtcacagcttgatctatttcatttttcgcattcgatttaactgctgttgctggttgtgtactttgaatcgaatttttacctgcatctttcgctgtatctacaccattatcatcagttgcagctgtaatattatttttcgcgtctgtaactgctgttgctaattgttgaatagctgcttctttttcttcatttgtagcgttctgatcattattgataactgatgtttgagctacttgtaattgatcaatctcatctttagccgcttgtttcttcacaacttttggtgttaccgcattaattgctgcttccgcattagctttcgctgcatcaacatcggcatttgttgtagctgctgcgatggcttgatttgctttaccattttcagtatttgcttctgcatcagctgcttgtttttcttcatctgttgcatctggcgtagcttgaatctcttgcaatttgttatttaaaattgttgtgatttcattacgtgcagttgcttttttattaactgttggtgttacttgatcaatactagtttcaccagttgttttcgcttggtctacatcattttgactattagcagcttcaatgttgctatttgcttgtgtcacagcattatctacattcgcatttgccgctgcaatttcttcagcagtaatgtcttgcgtttgagcgattactgttttacgttcattcgctttcgtagtgatggcttgtttcgcatcatctttcgttgttgtcgctggttgaattgcttcaattttagcaatttctgcatttttagccgcttcaacttctgcatttgaatgtgcaccatctattgctgcatcagctgttgttttttcagtttgaacttgttgtttcgcagctgctttttcttcagttgttgcaccattattagcatcaattgctgtctcttgtgcctgtactttgtcagtaattgcttgtttcgctgttggtttaacatttgcatcaggtgtaatggctgcgattgtagcttcatttgtagtttttgcattatctacatctgcatttgctgcagcattatctatttcagcgtttgcagtaactactgcttgatcaactttgtctttcgctgcttgttgttcttcagtagtcgaatcattcattgcttcaattgcagttttacgttcacttgctttttgagcgatttccgctttagcatccgatttcttagttgtggcagcttgaacttgattaattgcagcaataccattgtctttagctgttgttacatcactgtttgtatttgctgtatcaaggtttgttcttgcttcttgctttttagtatctaattctgtatatgcagcttgtttttcttctgtagttgaagcattgctattttgaatttcttgtttacgtgtattatatgcgttttctacttccgtatcagctgcaggtttaacttttgcttgtgtttgaattgcattgattttatctaatacttttgattttgtatcagcaacatcctgttttgatttaacaacttggatgtcatgtaaaccttgcttttgagctgcatctactgctgcattagcttctgctacttcttcattagttgcatttgaaactgtagcattttgagcttttctagctgttgcagcttgtttaacttcattataggcatccatttttgtttgagtagagtcagtaatattttcaatttttgagatttcttcgtttttaactctttctaaatcttgtgcagtcgttgtcgcttcaattgctttaacaccagaaactttagctgcattaatacgcccaatagcttccgctacttcttcatttgttgtatcaggatttaaaggtgcttgatcaatttgtgcttgaacaacttcgtcaaattcttcaagagctgctgctttagctgttgtagcaggtgcagtttgattaatatcattgatcgcttttgttttaatggcttctacttgtgcatttgttgttgctgcatcaatatctttaattgcctttgtttcaattttaccaattttatcatttgctacatctttttcatcttgtaatgacgcatttgactttttaatttgttgtttacgagttgtaactgcttggataatatcttgtttcgcttgaggtttaactgttggtgtaatcacatcttgttctaacactgcgataccgttatctttttcagttgtaacaccttgtgctgttgtttgtttattaatttctgcgattgcattatttttatcattgttaattttagtcacaagcgctgcaacttcatcttgcgtaacttttttactttgttgtgctgctgtaaccttttcttgagctttagcatctaattcagcaattgctgcttgattatcaattaatgcagcttgtaatttagttactaaaccatcaatatccgcttgagatgcacgatttgcagtttcaacatgattcgcatcttcatttaaaatattgtctgcttgttgtttaagtttattgtattctgcaattgatgctgttgtgtaatgactattatcaacttgtgagtttacttgttgttgcaacgcatctttgttcatttcaaccgctactgaaaatggatctgcagttagtgtaacttctggttgcgcattattaattacaacatctgaagcagtacgatatgttaatttttcattaaaatcaatatttttaggtgtatcgatattcgcaacattaactttatatgataattttaaagatttatctgggaataaaatttctttagtgtgtgtaccgcgtgccgttgtcacaccttggcttgtaaatgtaactttatttgcagtttgatcataattaacagtcatatttttcaatactgtactgtcttcattaccattagggaatgttgtagttaatgaatcattaacgtaagttacaccttgtggtaatgttacttcatatttaaattgatctgcttttaatgaagcaccaaaattaccattgttaccgatttcagtattaatagtatattctttattgttagttgctttcggtgctaaatctctattttttacatataaatgtgatcctgagaatagacctacattatcaatgaatgaatagtatttataaccatctttatttgttgtaattcttgaagcatcagcaactgctgtattgtcaggaataaattgtaaatctaaacgatcagcatcagttggtactttaaataaatgtgcagtaccagtcttagcaacatttacagttgctaattcagtatttttcttagcatctttaataactaaatttgttgcaccttgcttactattcgtttgcatagtagtaaagttaataattaattctgaatctggttttacatttacagtttttgaaataccgttaaagttaccatgatctgtagaatcatttgcattcacacgacctaatgcagccacgtttcctttagcttgatagttttgagggttattcttatcaaacatatcgcttcgtcttaattctgagttaacgaaaccaatcttaccgttgttaattaatgaataacagtttactttatctgtaacagttacagttggatcctgtctattctcatctgttgatatggcaggatcatcaaacgttaatgttgtattaatactgccttcaccagtattgctagcatttggatcttgagtttgtgcgtttgctgctacaggtgctgctggttgcgctgctgctggagcattcgctggctgtgtttgatttgccggtgttgcattattattaggtgttgcttggttatttccttgacctgcttggtttgccggtgctgcttggtttgccggtgctgcttgatttccaggttgtgcttgtgcagcgttattcggatcagcttgattaccttgtccagctggttgtgtatttggttgtgctgctcctcctgctggattagcctgtccaccttggcttgctggttgtgctgctggttgtccttggttggcaggtgtagctggctgtgctgtaggattagcttgagcaccagcatttgcgttaggctgtgtattggcatcagctggttgtgctggttgattttgtgcaggctgattttgctctgctgcagacgctgttgtcgggttagtagatataaaagtaacagtggcaattaaagctgaaaaaataccgacattaaattttctgatactaaatttttgttgtctgaataaattcattaagtcatcctcctggttgattattctcgctgttaaatgatttcacttaatcaactgttaagataagtagtagcatctgcgttaaaaacacaaagcaactctatctaattaaaattaattttatcatcattatatattgagtaccagtgtattttatattacatattgattactttgtttttattttgtttatatcattttacgtttgtactataaattatttctacaaacacaaataagccgatgcatacgcatcggcttatttgtaatacagtatttatttatctaatcccattttatcttgaaccacatcagctatttgttgtgcaaatctttcagcatcttcatcagttgctgcttcaaccatgacacgaactaatggttctgttccagaaggtcttactaaaattcgaccttctccattcatttctacttctactttagtcataacttctttaacgtcaacattttcttcaacacgatatttatctgttacacgtacattaattaatgattgtggatattttttcatttgtccagctaattcacttagtgatttaccagtcatttttattacagaagctaattgaataccagttaataaaccatcaccagttgtattgtaatccatcataacgatatgcccagattgttctccacctaagttataattaccgcgacgcatttcttctactacatatctgtcgccaactttagttttattagatttaattccttcttgttcaagcgctttgtaaaaacctaaattactcataacagtagaaacaatcatgtcattattcaattcttgatttttatgcatttcttgaccaataataaacataatttggtcaccgtcaacgatttgaccattctcatctactgctatgattctgtctccatcgccgtcaaatgctaacccaaaatcactttcagtttcaactactttttcagctaatttttcaggatgtgtagagccacatttctcattgatattatatccatcaggactacatccaattgtttcagtatctgcttctaaatcaccaaataagaatggcgctagtgatgatgttgaaccatttgcaccatctaaaacaattttcaaaccttcaaagttaacatctactgttgattttaaatagctcaaatatttttgtgccccttcaaagtaatctgaataatgtacaatatcattgccaactggtcttggtaattctgggttttcttgatccaataatgcttcaatttcattttcttgttcatctgatagtttaaaaccatctgatccaaagaatttaataccattatctgcaactggattatgagaagctgaaatcattacacctaactctgcacccatatcgcgtgttaaatatgcaacacctggtgttgaaataatacctaatcgcatcacttctgcaccaattgaaatcaaaccagctattaatgctgattctaacatttcacctgaaactctagtatcgcgacctacaagtacacgtgggtgtttttcacctttattatgtgctagaacatagccaccgtatcttcctaatttaaatgccaattcaggtgttagttcttggtttgcgacacctcttactccgtctgtaccaaaatattttcccattgtttactctcctttaatttagctatttattttacatttatataagccttcgtttcacttggttgtgctttagtgacatgttctggtaagttgatttttacagtcttttcagttgattctgaaataccatctaaatctacttctgcatcaacttcgcttatattttgcaagtcatctcgactaccgaagatttcaatttctttatcttctaagtcaatcgaacttaattctttatcatctgctaaactacctttctgtttaacatttactttaacctttttgctaaaaggctctactttaacttgtaaattcacttcattaggttgaatcgatacatttaatttattcagttttttatcaaaagccgttacttctgcgacatcttttgtgtcaccattaatctttttattagttttaaaagtggcttttaaataagcaatatcattcaattgttcttctccacctgttactttaactgtttgtggtgaaaattcttgctttgtaattttaaaaagtggatcaatatcactctgacttacatcaggttggactgtcatctttttagttactttgttttcaagcgtaatatttgctaatttaggttttacagaataatgaatgtcatcagctaaccctttaacttgatacttctcttgatattttccagctttagcatttgataaatcaatcactactcttaaatcttctggattttcaatttttattatctttgattgtggtcctgaaatagtcacattaactgtttcaggcgcttttgttaaatgcaaatctttagtgttataaagaatttcaacgggtacatcttgaatcgttttactagacttttgaccaagattaccagtgttaaagatatttccaaaaacattgttaacagataaaaagaaaaacaatgccaaaagaaaggcaataaatctcaagccccatttactttctagcatattatttcacacctttcttttgaaagcgtgtgccaaaccaatgttcagcaagcaactcttcaaaaatttcgtttgaaatgtctcgtcgtaattttccatcaaatgttaccgaaatatcaccagtttcttcagatacaataacggtaaatgcatcagatacttctgaaataccaaccgcagctctatgccttgtacccaaacttttagatatcttaggactatcagacaatggcaaataacttgctgctgctgcaatcttcgtgccttgaataatcattgcaccatcatgtaaaggtgtattaggtataaagacattaattaaaagttcttgcgaaatatttgaatccattgcaatacctgtttcaatataatcttgaagacctgtttctttttcaaagacaattaatgcacctatacgtcttttagccatatattgcacagcctttgaaaccgattgaatcaatttctcttcatctttactatacgtattagaagtatagcgttttaaaaagctacctctaccaagttgttctaacgcacgtctaatttctggttggaatattactattaaagctaataccccccattgaataacgatatcgaataatttagatgttgcagtcaagttcaatatcatacttatctgctgaccaataacaattactaatatccctttaagtaattgtatcgctttagtacccttaaagaccgtgatgagaagataaagtacataccaaactatcagtaaatcaaggatactcgttacaatttttaacgtactgaggttttgaaaaaagttggaaaaatccataacatctcctccgggtaatatttttccataatacccattataccaatcatttacatcactgtcatacgaacatatatttaaatagaaaaaatttattttaaagattataactactcttaatcattttagtgaattaaaaaaagtagtgcaaaaagcaaaatatactttatacactacaaatcatttatttataataaagtttcaccaaaaaatgttccaactaacgaaaccgcttgttcagcagtatgattatttctgtcaatcaatggatttacttcaactaaatccattgaggaaattaaatgtgattgatgcagtaattccaatgcaaaatggctttctctataactaagaccacccaaaactctagtaccagtgcctggcgtttcaagcggatctaaagcatcaacatctaaagataaatgaacgccatcaacattgcgtgacttcaaatattctattgtattttcaattacttcctttatccctaatttatcaatatctgacattgtaaatgttttaatattatgatctttgataaattgtctttcacctttatctaaatctctcataccaattagtacgatgttttctggcttgattacattactatttaattctaaaagttctttgggaccttcacctgtcaaaatccttagaggcataccatgaatatttccacttggtgactcttcaggtatatttaaatcaccatgtgcatcataccaaataacacctaaattattataatgtttacttattgctgatactgaacctaccgcaatagaatgatctccaccaagaactagaggaaatctgttattttcaattgatgctgaaacttctttatttaatttttgattaacatctataatttcatcataatttcttaatcctttttgttcactatgaaatttttcaatgttcacagcaggtaccttaatatcccccttgtcatatacatcaaggcctaattgctttaatcttgaaattaatccagcatatctaattgctgttggtcctaaatcaacacctaattttctttgtccaaatgttgatggtgcacctataatatcaattgcttttgtctttgtcataagcgtccccctttgctctatgtaattaaagaataatgtatgcgcttaccattatcaagcaatagctacacatataatctgtttatcttattacttcataaaaaaaagcactttccaaaaatggaaagtgctagtagtgagccatagaggattcgaacctctgaccctctgattaaaagtcagatgctctaccaactgagctaatggctctaatggctgggctagctggattcgaaccaacgagtgacggagtcaaagtccgttgccttaccgcttggctatagcccaatatatagatggtggaggggggcagattcgaactgccgaacccgaaggagcggatttacagtccgccgcgtttagccacttcgctacccctccagcttattcatataatttaataatcaaaatggtggagaatgacgggttcgaaccgccgaccctctgcttgtaaggcagatgctctcccagctgagctaattctccaaaataatgactcctacgggactcgaacccgtgttaccgccgtgaaagggcggtgtcttaaccgcttgaccaaggagccatggctccacaggtaggactcgaacctacgaccgatcggttaacagccgatagctctaccactgagctactgtggattaatattatgcctggcaacgttctactctagcggaacgtaagttcgactaccatcgacgctaaggagcttaacttctgtgttcggcatgggaacaggtgtgacctccttgctatagtcaccagacatatgaatgtaatttatacattcaaaactagatagtaagtaaaagtgattttgcttcgcaaaacatttattttgattaagtcttcgatcgattagtattcgtcagctccacatgtcaccatgcttccacctcgaacctattaacctcatcatctttgagggatcttataaccgaagttgggaaatctcatcttgaggggggcttcatgcttagatgctttcagcacttatcccgtccacacatagctacccagctatgccgttggcacgacaactggtacaccagaggtatgtccatcccggtcctctcgtactaaggacagctcctctcaaatttcctacgcccacgacggatagggaccgaactgtctcacgacgttctgaacccagctcgcgtaccgctttaatgggcgaacagcccaacccttgggaccgactacagccccaggatgcgatgagccgacatcgaggtgccaaacctccccgtcgatgtgaactcttgggggagataagcctgttatccccggggtagcttttatccgttgagcgatggcccttccatgcggaaccaccggatcactaagtccgtctttcgaccctgctcgacttgtaggtctcgcagtcaagctcccttatgcctttacactctatgaatgatttccaaccattctgaggaaacctttgagcgcctccgttaccttttaggaggcgaccgccccagtcaaactgcccgcctgacactgtctcccaccacgataagtggtgcgggttagaaagccaacacagctagggtagtatcccaccagcgcctccacgtaagctagcgctcacgtttcaaaggctcctacctatcctgtacaagctgtgccgaatttcaatatcaggctacagtaaagctccacggggtctttccgtcctgtcgcgggtaacctgcatcttcacaggtactatgatttcaccgagtctctcgttgagacagtgcccaaatcgttacgcctttcgtgcgggtcggaacttacccgacaaggaatttcgctaccttaggaccgttatagttacggccgccgtttactggggcttcgattcgtagcttcgcagaagctaaccactcctcttaaccttccagcaccgggcaggcgtcagcccctatacatcaccttacggtttagcagagacctgtgtttttgataaacagtcgcttgggcctattcactgcggctcttctgggcgttaaccctaaagagcaccccttctcccgaagttacggggtcattttgccgagttccttaacgagagttcgctcgctcaccttagaattctcatcttgactacctgtgtcggtttgcggtacgggcacctattttctatctagaggcttttctcggcagtgtgaaatcaacgactcgaagacacaatgtcttctccccatcacagctcagccttaacgagtaccggatttgcctaatactcagccttactgcttagacgtgcaatccaatcgcacgcttcgcctatcctactgcgtccccccatcgattaaaacgattataggtggtacaggaatatcaacctgttatccatcgcctacgcctgtcggcctcagcttaggacccgactaacccagagcggacgagccttcctctggaaaccttagtcaatcggtggacgggattctcacccgtctttcgctactcacaccggcattctcacttctaagcgctccacatgtccttacgatcatgcttcaacgcccttagaacgctctcctaccattgtccaaaggacaatccacagcttcggtaatatgtttagccccggtacattttcggcgcagtgtcactcgactagtgagctattacgcactctttaaatgatggctgcttctaagccaacatcctagttgtctgggcaacgccacatccttttccacttaacatatattttgggaccttagctggtggtctgggctgtttccctttcgaacacggaccttatcacccatgttctgactcccaagttaaattaattggcattcggagtttgtctgaattcggtaacccgagaggggcccctcgtccaaacagtgctctacctccaataatcatcacttgaggctagccctaaagctatttcggagagaaccagctatctccaggttcgattggaatttctccgctaccctcagttcatccgctcacttttcaacgtaagtcggttcggtcctccattcagtgttacctgaacttcaacctgaccaagggtagatcacctggtttcgggtctacgaccaaatactaaacgccctattcagactcgctttcgctacggctccacatttactgcttaaccttgcatcaaatcgtaactcgccggttcattctacaaaaggcacgccatcacccattaacgggctctgactacttgtaagcacacggtttcaggttctatttcactccccttccggggtgcttttcacctttccctcacggtactggttcactatcggtcactagagagtatttagccttaggagatggtcctcccagattccgacggaatttcacgtgctccgtcgtactcaggatccactcaagagagacaacattttcgactacaggattattaccttctttgattcatctttccagatgattcgtctaatgtcgtcctttgtaactccgtatagagtgtcctacaaccccaacaagcaagcttgttggtttgggctcttcccgtttcgctcgccgctactaagggaatcgaattttctttctcttcctccgggtactaagatgtttcagttctccgggtgtgccttctgatatgctatgtattcacatatcgataacatgacataactcatgctgggtttccccattcggaaatctctggatcaaagcttacttacagctccccaaagcatatcgtcgttagtaacgtccttcatcggcttctagtgccaaggcatccaccgtgcgcccttaataacttaatctatgtttccatcctacaggaaacgcgttattaatcttgtgagtgttctttcgaacactagcgattatttcttatgaattcaagcttatttaaaactctttattcactcggttttgcttggtaaaatctatattttacttacttatctagttttcaatgtacaatttcttttcagtcaagcgctcgcataagcaatatcactttaaccaaaaaatatttgaatgttaaataaacattcaaaactgaatacaatatgtcacgttattccgcatcttctgaagaagatgttccgaatatatccttagaaaggaggtgatccagccgcaccttccgatacggctaccttgttacgacttcaccccaatcatttgtcccaccttcgacggctagctcctaaaaggttactccaccggcttcgggtgttacaaactctcgtggtgtgacgggcggtgtgtacaagacccgggaacgtattcaccgtagcatgctgatctacgattactagcgattccagcttcatgtagtcgagttgcagactacaatccgaactgagagcaactttatgggatttgcttgacctcgcggtttcgctgccctttgtattgtccattgtagcacgtgtgtagcccaaatcataaggggcatgatgatttgacgtcatccccaccttcctccggtttgtcaccggcagtcaacttagagtgcccaacttaatgatggcaactaagcttaagggttgcgctcgttgcgggacttaacccaacatctcacgacacgagctgacgacaaccatgcaccacctgtcactttgtcccccgaaggggaaggctctatctctagagttgtcaaaggatgtcaagatttggtaaggttcttcgcgttgcttcgaattaaaccacatgctccaccgcttgtgcgggtccccgtcaattcctttgagtttcaaccttgcggtcgtactccccaggcggagtgcttaatgcgttagctgcagcactaaggggcggaaaccccctaacacttagcactcatcgtttacggcgtggactaccagggtatctaatcctgtttgatccccacgctttcgcacatcagcgtcagttacagaccagaaagtcgccttcgccactggtgttcctccatatctctgcgcatttcaccgctacacatggaattccactttcctcttctgcactcaagttttccagtttccaatgaccctccacggttgagccgtgggctttcacatcagacttaaaaaaccgcctacgcgcgctttacgcccaataattccggataacgcttgccacctacgtattaccgcggctgctggcacgtagttagccgtggctttctgattaggtaccgtcaagatgtgcacagttacttacacatatgttcttccctaataacagagttttacgatccgaagaccttcatcactcacgcggcgttgctccgtcaggctttcgcccattgcggaagattccctactgctgcctcccgtaggagtctggaccgtgtctcagttccagtgtggccgatcaccctctcaggtcggctatgcatcgttgccttggtaagccgttaccttaccaactagctaatgcagcgcggatccatctataagtgacagcaagaccgtctttcacttttgaaccatgcggttcaaaatattatccggtattagctccggtttcccgaagttatcccagtcttataggtaggttatccacgtgttactcacccgtccgccgctaacatcagagaagcaagcttctcgtccgttcgctcgacttgcatgtattaggcacgccgccagcgttcatcctgagccaggatcaaactctccataaaaattatgatgtttgattagctcataaatactaaataatgtttgtaacttatagttacgttttttggaattaacgttgacatattgtcattcagttttcaatgttcattaatgttcaatctcttttattatacttcgtttaattgttgaagtcaataactttttgaacgattactttatttattctatattgtttttatagttatttcaatggtaagttttacacttttgaaattcttctttaaaaacatcgccgccgtttttgacgactttattatcttatcaactttataatttaaagtcaataacttttttgaaaaacattcgtgtttgcaagccgcttcttttttcaatgcgttgattgcttaacacaagaacttattttaccagcattttaaaacaattcaatataaaaacgtacaaaataaaagtaattttgtacgtttagcatatattatacctatttatttgtagcagctataactttttgtgcaatcgagctataaattttacctagacgatcatctgattgatatattgacggtgcaaaatcttttggattccaagatggttgctctaaaggtaattccccaagtaattgagtattaagttcatcagctaacttagtaccgccacctttgccaaagacatattctttattacccgtctctttactttcaaaataactcatgttttcaattacgccaagaatagaatgatccgtatgttttgccatcgcacctgcgcgagctgcaacaaatgctgctgtaggatgaggtgtcgttacaataatttccttacttgaaggtaacatcgtatgaacatctaaagctacatctcctgttccaggtggaagatcgagtattaaatattcaatgtctccccatttaacttctgtaaagaaattcgtcaacattttacctaacattggccctctccatataactggcgcattttcttccacaaaaaaggccattgatataactttaacgccatgacgttcaactggaattacttccttccctttaattccaggcttttcatcaatacccatcatatctggtacactaaatccatatatatcggcatctactaatccaacttttttaccttcacgggctaaggcaacggctaaatttactgcaacagtagatttaccgacgccacctttacctgaagcaatagcaataaattcaactggattattttgagataacagcccttctatcgttttaggtttattttcttcttttggtttaaattgatttactttttcttctggtaacgtttcaaatcgtatacccacagtttttgcaccattttcttttaaaacattaacaactgccatctgtaaatctaattgcggtgcaccacctaattgtgccattgccaatttaacacttacatgttctttttcttccttaatagaaacttctacaataccttctgtttcttttaaaggtacatctataataggatctttaatttctcctattagttctttaacttgaactaccgttaacaaagtaaatcccccttaatcaatttaaaatatctacataattgcaaatgtcattttttacgtagtctatcaataaaagtataaaacttttcattaaataaaaaaagaagttagcctattattttcaatagaccaactactcatattattttaaaatttccttctattactttcaatctcttcaggttctctgataaaaattgctatcacataagcaatcataactagaactgctacaaatccaaatgagatatctactccaatagcaatcgattgttgttttatctcagttgaagttaagtgtgatggtgaagttgataaaaatatttttgcaccaaaactcattaatgtaaccattaaagctgtgcctagtgaaccagccattacacgaccaaagttcataatagccgtgccatgtgagatttcttcatttctcaaagaattaattcctgtagtatttatcggcatcatgagtaaagaaactgaaaacattctaattgcatatacgactattaaatacgtataagatgtatctgtatgcaagaaacacaacataatagtagtaattgttaaaatcgtaaaaccagtataaatcaatggcctaggaccatacttatcataaaatttacctgtaaaaaccgacataataccatttattattgcaccaggcatgataactagtcctgataacaaggcagataaagataaactgttttgaacatatagcggtataagcagcgcgggtccaaccattgacatcataataatcattgaacttatcgtacataatgcaaatgttctatttttaaaaacccttaaatttaaaagtgcattactaatattaaattgtctacgtataaataaatagataataaccatacttattatcaatgcacctattactattggacttgtaaatcctaaatctcctgcactactaaatgcatatagcattaacccgaacccaatagttgaatacattactgagcgcttatctaatttagtatatttcacttcattgtaactcgagattgaaaccaaaccgaaaacaaaggcaactaaagcaattcctacaattataataaatggtactcgccaactcgcttgatcaatgattaatcctgtaactgtaggtcctattgctggtgcaaattgaataactaaacctgccagccccattgcaaaacctcgatgttctttactgaacaatgtaaataacgtaaattgcattaagggcataagtacccctgcacccatcgcttgaattacacgtgctaacattaaaactccaaaattcggagctaaggctgcaacaatagaacctaataaaaatgtccccatcgctgctaagtataaaggtctagttttaatcctatccattagatatgccgtcagaggtatcatgacgccattaacaagcataaactcagtaactagccattgcgatgtactttcattaatatttaattctctcattatactaggtaacgctgtatttaataatgtttgatttaaaatagctacaaacgcactaatcaacataacagcaactatgaagtttcgtctccgggttgttaattcaactttagccatcataattcctcctttttaaacagatatacacttgtccttttaatacatatagccattaacataatgggagtagtactcaaatgataaagaagcactacatattaaatcattattggttcttgggagtgggacagaaatgatattttcgcaaaatttatttcgtcgtcccaccccggcaaggttgactagaattgaaaaaagcttgttacaagcgcattttcgttcagtcaactactgccaatataacttcgtagagcatagaacattgatttatgtcccagcctgacttaaaaaactaacaatataacattgtagcgcctaataacttattttatgtctcagactcatacaatggttatttaacttatttaccacaaattgagcactaagactcactattatcgattgttctattgaacaaaaagaagttggaacacatatgtgcactcaacttcagatatctattttctattatttaaatttttactttcagggtaaaattgaagcttacaaacatataagaaccctataataaccatgattacccaaaaatcgatattgatataaacataatttaaatgaatgatgaaataaaataacgttgttgcaactgtgtaagaaatcaaatgaaaagtcgcgcctctaaaatatgcattttcaggcaacatttttctaaaataatccattaaatgctcgactgcaaatatgatgaagtacccaaagattatataactgccataatacaataggttatcatacatacttctattatatgtaaagtcacccaacctaaaataaataagtattctacttaatccatataaaccaaagcctagaaatgttaaaaaaatcgcaccagaaagtacaaaaataaagagaacaatcattgtagttaacaagttataaaacttatgtttaagataattcacaatcattggcctccttattaataaaatattgaacgatttatctagcatctagtaaatttattatttcttactttaattacactacatcaattttaatcataattctattcttttgattgagataactgttctttaaaaaatacgacccataaaacaataagcccagtgctaattacagcaacagcacttaacacattgtgtaagtttggaccaaagattcctgattgtatcgcataaagatatcccattattgttgaacctattgatgccccaagatttttagttaatccataaaatgacatcatttttttcatttgtaatgggctagtttcttcttggacaattacactatctttcgtataaatatatccaaaacttaatcctgccaaaattaatacaaatgcaataagtaacggcagtttaataccaaatgaaatgataatactacttactagtagcaacgtaaatgatagtaagtaaataactttccttgatagttttgcttcaattcgatgtaaattaaaattcaatgtaatccaagctacagataaaggaaaaataaccaatccactttgtaatggagataatcctagttgttcttgaaggtagactggaatatataaattgaatcccattaaacaaatagctgttagaaggtcagttataaaaactaaagtaatcgaacgattaaattcaaccacaggtaaaaatggtgaagaaacatgtttttctactttaaataaacgtattgccacaacgatagctaagataaaacttaagaaatttaaaagtaatagctgttggtttaataacgcaaacataatcaatccaataaatacataaaatagcgtgagccctttagtatcaaattttgatttagcaactgtttcttcctctggaaaatgaaatgtccatataactaatataatggcaatgatcgcaatcggtatatttatgtagaataaccaatgccatgttgcaaattctaatataccgccacctagaagtggcccaatgatactagaaataccccaaacactgccaactatgcccataattttatatcgtaacggaatttcaaatgctaactttggaacaatttgcgataatgacatcaatacacctgatccaaaaccttgtatcacgcgtgatataattagcatagtaaaattagtacttaaaccacacattaaactacctatactaaataaaagtaatcctgcaattgccacataaataattttaaatctcgaaagtaattcgcccactataggatttgcaattactaatgcgataaaatacgcggtaaaaattaatgaaattaaatttcctgcatttaaatcttgtttaattgtaggtaatgcaagcgaaataatagatgattcaatcgcagacataaacataattaatattaaagctataacagttatgattgactttaatcgcatgaaatacctcattctatatatttataagattttatttacaaactattgatttttatatgtataaacacttttgactttcaaagcttaacgataattttattacaatacaatcccctaatagaatgatttaagtaataaaaaaagcggagtttcccccaccttttctaaacgactacataaaatataagattgcaattaaatgcaatagtgatgctataacaataaatatatgccaaatcatatgaaaatatggtctattcttttgtgcataaaaccatgcaccaattgtatatgacacaccgcctaagaaaatgaataatatgaatatccatgatgtgcgaataaaaataattggtaacaagataatacctacccagcccatcactaaatagacaattaaacttaacttttgattaactttgacagctatggatttatataaaattccccaaagagtcgttccccataataaaataaatactgtccaacctatccaaccacctacaattgttaacaaaataggagtgtatgtacctgaaattgctacgtaaatcatactgtgatcaataatccttaaaatatatttatggggtgtttcattttgcatagagtgataaattgttgatgaaataaacatcataaagatagaaataacataaattgacatactaactgatgcaagtgtgccatttgcaatataactatgtacagccgcataaggtaagactaatagtgttaacagcgctgccagcccatgagatgcagcattgcctatttcttctccaaatgacaatggaatgatatccttaaatgtttctgcaattgtgtcattactttttttacttgatttggacatcatagtcaccgcctaacattaaattaaacccattctacgtaaatcttcagttgctgttgcaacactatctttaccttctttatttttaaggggtgaaaactcttcttctctaggaacttgtaacgtgacaaaactagttccataagtaaatatgtcaaaatagaacaattcgaattttaaagttggttgttcaataaccccaaagttctcatctaattgcttcaaattcttaatagctaaatgataaggtaattcacgatttacagcatttaaaataaagccaagtttaaatgcatgaataccgatattagcattgttaaattgatttgcaacttctggatctaattctgaatactccaatactgtatctttacaatcgacattaactaatcgtccaacactttctcctggttttggttgaatcgttttagaagtaatatcgtaattatgttctaccgtaaatcctgcaaatagtggatccaacacttttactaaaacattatcgatattattcaagaaaatatacttaacgccattattagacatttcttctaagtatcctgccttgtctaaagatttaaacacgccaccattaccattcggcgtttccataatacgaccctgttgatttaaaattaacttcccttcttcactaagcgccacaatattatcttgtttaaagaaatggattgcttcttgatcatatccaaaataactatgtgcttcgaaataagctaaagtttcttcatgattgatatcacttgtcataatataccattgaatcgtatgtccagattgatgattcaatgtttttaattggttagcttgaagttcaaataaacttacaccttcaatttcaaacgaacctttaggtcccttgtaaccaagtcttgttccttgaccacctgccatcaaaagtactgcaaattgtccttctttaatagcttgaagtccttgttcctctaaacgcttaatctcatcatcactcatttgtgatttaatatcatatttcacttcagaaactgcagatacatcatctattgttttcttattgatgtataaatcgttatataatttggcaataaaatctaaatctaatgacgctaccttctcttcaagcgcttctttttcattgttactcattattttttcatattcacataaatgatcttgtttatatttagctaattgatttttatctagcattttatgcctcctgctgagtttgtaacctttaataatttattttctataaaaacttagtattccagttgcttattatatcattgatgaaaggctgaaataaaacataaactgttccgaccattaacgcagtagctaaagataagtctacaagtccacctgttttaaattggattggtgtcttcacattaaacggtaacggataaaataatttcacgccttttggtgttatcatatctagtataacatgtgacactaatccaattataattgctaccatataataattaggcgtctgaataatttgcaataaaaatgctatgattacgataaataatattgaatgcgtaaaggttcgatgtccaaagatcaatctcacaaaaaaactaattaccttaaaccttctgccaatcttactttgagtgtgacatatatcgggtgataagctagctagagttgctagaatgataaccgtaaccgacgaaaaaatatccgtttgaaaatattgtgttgttagcgctccaacgagcatgccgcatgaagcatgtgttttacctgtcatatttgttctcctttaatactcacattttaccatatccctaacaaaaacacgaacatatcttcgggttaaacttcattagtatgacacaatttaaaaaagtatcacataaactcttgaaaacgattacaaaatcgtttatgatgtatttacaaaatatttaaaggatgtgtttgaataatggcaatgacagtaaaaaaggataataatgaagtgcgtattcaatggagagttgctgatatcaaaattcctacaagtgaaattaaaaatataacacaagaccaagatattcatgcagttcctaaattagacagcaaagatgtatctagaatcggctcaacatttggtaaaacgaatcgcgttattatcgatactgaagaccacgaatacattatttatactcaaaatgatcaaaaagtttacaatgaattaactaaataaattgtataaaaaatcattcatggtgagggcttcatgaatgatttttttaattgattcaacacccagcataaacaaatacaaaaggacaactgtttccacaattttaacagttgtccttttctatatctaattacaataacaagtgtgccatcaaagaaataatcggtagtgtaatgattgttctaatcaagaaaatcataaacaatttgccaatgcttacaggaatcttcgaaccaagtatgacgccacctacttcagacaagtatattaactgcgatatactaagtgctccaattacaaaacgagttatatcattttgtacaccttcaattaatatagaaggtaaaaacatatcggcaaaaccgataataatcgtttgagaagcctgtgccgcttcaggtatttgcattaactctaaaaatggaacaaaaggtttacccaatatgacaaaaaagggcgtgtagttcgcaataatagtagcaatagtaccaatactcatcactacaggcaaaataacaaaccacatatcaacgactgtttttaatcctgacttaaaaaagtcaataacgcccggtgctttaatacctacttctgttgcagtatcaaagccatgtctcaatgccgtctttccttctggcaatgcctcagtacgcgcactttcaggtacctccttagcatactcatcaggaattttatttaaaggccaaattcttggcataatgactgctgcaacgaggcaggatactatcactgataaatagaaagcaaaaaattgattttgcatgtgcactgtttcagcaactacaattgcaaaggtgatagaaactacactaaatgtcgttgaaataactgttgcctcacgacgagaataatatccttcaccatattgtctacttgtaattaagaccccaacagttccgtctccaataaatgatgctaaattatctaccgtcgaacgtcctggcaatgtaaataaaggtctcataaccggtctaaaaataggacccaacatctctaacaaaccgtattccattaatagcggtaaaaatagagctgcaaataagaatactgccactaatgttggcaataaacttgagaacaataatccgcccgtttcatctgagtaaataacctttgaaccaatttgtaaaaatgtcatccatgcaaaaacaactgctaatattcgtaaaattaaccaaccaattctaacgttaaaagcattgttcattagcccgtcaggtttcaatttatcttttaaaatagttgaacaaatcagcgttatgatacccgataaagtaattatcgtcacaattaaaaatggcattacgccacctaatacatctttaagcacgcctgctaaaaatgccacgggcaacgttgtttgcttctgtccatcttgttcgactggaattggtactagaaataataagataccaattaaagacatcgtaataaacttaagtctcccaatgattatctctttccttgaaaagctatccataaaatcaatccatttctctatgtattcgttttaagtatatacagaattctattcagttaacaaacatattccttatcattctatcctttaaaatgtttatgtatgcaaaataatgaataattacagttattaaatatacgctatttcttgtaatttttcaaggtgaattcaaaaaaggttaagtacaattactgatttcgtacttaaccttttttaactctaatcatatgttagttatttcattcttcgtaataatattaagaagtatggtgcaccgataattgcaatgataacccctacaggaatatccagtggcggatgaatgccacgggctaaaccatctccaaatgttaacaatatagcaccaattaaccccgacatgataataacgtgtaatgttttatttcctattaactgtctcgcaatatgaggtgcaattaatcctaaaaagctaataccaccgacaactgaaattgcggatcctgctaatattactgctaaaattagcaatagcattttaatagttttaacttttaaaccgagtgcggttgcaacagcatcacctagattcaatacatctaattgataactcaataaaatgatgattggtatcgttattaaaaaccaaggtaatatagtataaatattcgacatatcatgaccatatagactacctgtcaaccaaacaagcgctttgtttgcttccagtggatttctgattaataagaactgcacaatcgccgtacatattgcgcctattgctaaaccaattaaggcaagctttgaacctttaacatcatattttgaaattaaaaatgataaaaataaacttactgcaaaggcacctaagaatgaacctataggtaacacaaacaatggtgctgttggaaagatcataataataatcacagcagctaaactggcacctttagaaatacctataacatcaggtgaggctaacgggtttcttattacagcttgtataattgcacctgatatagccaagctactaccgataataataccaagtaatgttctaggtatacgatactcatttaaaataaaatcatcttgtgtaaatattcccttaatagcatcaatcggatgaatcatgacagaccctacacataaacttatgaatatactcacaattaaaaggattgtgattaaactataacgacctataattttcgttgtcatcatattcttttcacccctctaatcgttataaataagaagtaaagtgcacctacgaatgatgtaacaatccctactggtgattcataaggatatgtaattaaacgacttaatacatctgatagtagtaacaaatctgcacctataataaatgttaatggaatcatgactaaataattcttactcacatagcgtttgactatatgcggtacgattaagccaacaaatccaattggtcctgccactgacaccgacatacctgtaagaataatgactaatagtccaatgataattctaactttatttatattttgacccaatcccttagcaatgtcatcgcctagttccataatcgttagttgacgtccaataaaaatcgttacaattaaagcacctataatccatggtagaatggtcaaaatttcatcccacttcatactggataatgaaccgacaagccaaaacatcacttgttcgtttgaattctcattcaaaataataataccttcagtcatactactaaaaaacaaatggatggccataccagccaatgctaatttaatgggtgtcatacctttcgtagcacctgaaagtgtataaacagttaaaccacctataaatgcacctatcacacctaaatataatgcataatattctaatgatggaatgataatcgtcacaaatacaatgaaaaacgatgcaccagaactgacaccgaaaattttaggtgatgcgagcggattgcgtgtcatcgcttgcattaacaaaccagataccgctaatgcaccgccaataaataaccctgcaatcatccttggcacacgtacattatgcaataaaaacgttgctttcgtatctgtatgaccagtaacatagtgaacgatatcgctaaaattaattttcgaagaaccaatcgccatatttaaatatatacaaataaaaagaaagcacaaactcactatatacgtgagtgttgtgcgtctttttcttttatgatctatggcagattggctacttatttcttttatagccatttacttccaccttacttttgttctttttttgataattcaacaagttctttagccatttcttcagaagaaattaagccacgagatcttgcccaaacatcacggtcaacaatatccacgcgattatttttaactgcattcaactttttccaagttggatcttcttgtaacttcttgaattcagcagaatcttttttagcattatctgtcataataatcatgcgttcaggatttaagtcagctaaatgttcagtatctaattgtaagtaaggtcctttcaagtatttacttaaaccttttgttacatcatcacttaatgcatttttaaatccaagttcgtttaaaaattgtccaacatatgaatagtttggatgtgctaataaaccagctttagcaacaactgctggaagcactttttgatttctatcaaacttaatttcatctttatactttttgattaatttatcatgttcagcaagacgcttttcgccttctttttctttatttaaagctttagcaattgttttgaacgaattaatgttttgtttgtagtctccatcaaaactctttaatgataatgttggtgcaattttgtttaattctttattaatacctttatgtctactgctatcagcgataattaaatccggttttaatttactaatttcctctaagtttggctgtttacgtgtacctacagaagtataatccccaattttttctctaactggtttaatgatacgttttttcttaccatcatcagcaataccaactggtttaacgtctaatgctgctaatgcatctgcaaatgagtactctaatacaacgatacgttttgcatctttaggtacttttactgtaccattttcatcttttaccgaaatagtatctttagttgatgattcttttttacttgaattatccgtattaccacaagctgcaactaaaaataaggcaactattaatcccaatatactaaaagtttttagacctctcatcgttccactccttaatatgtataacttcatttattattttattgataacaattatcattgtcaagtagcgttcaacccttttttatattactaaaatgtacgactatatatttcctctaataattatgactacaattagcacatttccttagacaaaatactgataatgtatcatggctatatcatctttgaattaatacaattgacaccatttagcatgatcgttatccctgtaattcagctgttattacctgttgcatttttttatgtgccgaactgttgaacttaatttgataaatcaacaaatacaaaaaatctaagttgaacaattatcatacaaccgtgtaaacgatatgtagtataacttgtcaacttagacttattgataaatatattaatattggtttaccatagcaggagatttcacatcataattttgaagtagcgtatcaatctttgaatcatcaatatataccttatgtaaatttttcatatacatcgaatgagaaagtgcttcataatttaatgaaaaagatatatgatctccaacttgatagtgtccttgaccatttaaatcaagcattaaatgatcactcgaagcgcctaaaatattgatatgctgatccataggtgaaatattatcgacttttgtatctaaataaccaatatctacaatagcttgtatgaatgattcatgcgtttgtgtattaactcgaggtttaatttctaaaatctcagcctccaatgtaatcgcatcttgatataacatagctatcgcttgatttgtcgttgtatcaacacctctaaacaacgtttcacctattcgcaattcatttattttacccaaatcattatataaaagttgtggtaacatgctcgaattaccgcctgaaataattttcaatcgatatcctatttctctttcaacagctgagacgaatcgattaatcataaagatatcatcatcacttggcgcatcagatttaaaacacataaaattgaatgctaaaccaacaaaatgaatatttttcaagtgaataatctctttaatataatctaaaacatcataagtcagaacaccttcacggccatctttccaatctaccattaataaaatcttatgtttttttcctaaaacttctgctacttcatttatttgatgtatggtagataattctgtttggatactcatatcaactttttctatcatatctgaaatctcttttttggcaggcgtacgcaataacgtatatgttaaatcctgatctgcaatactaattatgttattcaatctggattctgcaacatgattgatacctaacgcttttaagctttctacaattgtacggtcaccagctatgcacttaattactggtgtgaattgcatatttttactttgaaaaactgtttgaagtactttggcgttatatttaatcttcgatatatttatgttaacgtgtgccatgtagtactacacctctttttttatcggattatctaactcaatatttaaatattgctttactttattttccattctcatatttaataacgctttgacagtaattgttggtccaaacaaaatatcttttaactcatttgcatgtggtagtgttgggttaatggcatgcgctactacttgctgtactatgttaaataattcggcttcttcaacacaatcatactgattaaaatgatggattaattctgccatttgattttgaataacagcatgttggaattttgcaatcactgcatctatagaatcagctattaaactatcatttgtaattttaatatctgatacacgatgttgtaatgtttctaaatcaattctagaaccacctaaatctctcactaaaaattgaatgtcaaaatgtggccccaagttcactactgtattttgcatgtgtgcttctaatgcaattccataattttgaataaaagcaattaaaggcgggattaatgcttgagagtatcgttcaataaatgtcgtaatactttctttagtaattccttgatttaaccactctaagtaactatccacgataactttttgatctattggatttttattaactagacttgcactaactactgttgcaccttttccatcaatttcaggcttttgtcttataatacaagcaagctgacgtgccctatctttatcaacatatgcatattcaccgaacggttccatagcaactttaaatcctggatattgattcaacatgttttgtaaagcataacttaactttggtccatctacagtagtcacagttgagactgttctaacggcacttgttgcttgtgcatcgacgggcaacttaacatgatatggtttatcaattaaagacatcgtcctaaatgataaagttgcttttgaaagtattgtaaacggcgttggaattaatatttttttagcaatccatgcttcaaaatatttccctatcgtatgatcatattgccaaggatgtactaaaatcgctctgtagtcttcacttttcaaacctaaactcttcaaaaacacacgaatctgattgtagtattcgggaattatttcatcaataataaattgatcattaccatccatagctgtgcacacaacatggtctttttcaatcatcataatttgcaaagggatttctttttcaaactcaggtgcatatgctcgtacttcttccatagttaagggcaatttcgttttggttaaagggtgtgttggatgcccctctggtaccaaactctcagaataagttaaatcatctgtcttatcactatcttttacatgttgtaaccatgaaaaaaagttaatatcttgtggtaatcttgaaaatttaaaactttgacttattaatgtttgtctgtgagacatttgcttatatgtttcaactaaactatctcgactgtgtattaactcttcgcgtagtcgctctgaaatagggatatcaaagtcatgattcaacacatctaacaaaccttctaaagttataattaatgacgtttcacctttatttaaataagttatatcacctgtaaactcatagcgttctaatgcactttttctaacaacttcaatagtcaacacatgcatatgatactgaatttcaattaaagattctttttgtgaaataaatgtttgctcggggtaaatacgttctttaataatggcgttaattacacgatattgaatatttctatctgcctttgcccattcaagatataccatgattactttcctccaactttaacttcaactttctatttataaaatagaataccattgtaatgcatatagtacttattcccattattgaaaaagttctaacaatgccaaacacatctgcacatatactcattaacagacttcccaatggaatcatacctctatccatcataataatactcagtactttaccacgttcataatctttaacattattttgaaaataaacgcgatttgtcgtacgtgcccattgactaaacaacccaatcaatgtaatacaaatgaacatgatgacaatattgtgaaataccacacctaacaaagcaatgccaaataaaaatgaacttaaataatacatatttaccataccgatatatttaagtactttaggtaaaactagcgttgcaataataccaccaatggcacacatcgtcatagcgataccaaatatttcagatttccccggaaatactttgtttgttaaaactggtaaaagtgtcgtatatgaaaaacctgtcgccataatcaataaagatgttataaatatttgtcgaccttccatatgtaatttgaagtaatgtataatgacttttaacggcatgtatcttgttgcatcttcaggtattttagttactttaaaatgtaatggtaaacataataaaactgcgataaaataacaaattgcctgtgcaagaaatgttgttggcgcatgatagactgctaatatgacaccagcaatggcaggccctattgaacgacaaatattaatgatgaatgaatgaaatgatacagcttgtgtagtagatattttatctgataaatctggtaagattgcttgtcttaaaggtgtttcaaccgcacttaaaatccctcttaatgtcgcatatataataatgacgctaattggaattgcagtgaaactatacgtaagcacacataaaattgcagttactaaaaatgatgatgaaattgtaattctcagcaatcgccctttatcatatttatcggcaattgcccctgcccacacacttagtaataatattggtacaagtctgcaaaaattgacaatccccagataaactgcgttatgataagtggtaagcacaaaccaatttagccctatttgtccaatccaattacctagaaatagtagaaaagaactgctaaaaaaatattttgtcataaaacttacacccgcattctgttgataataagaatcattatcattaatatggattatacaaatctatcttgcttttgtaaaatatttcatagaggtgaattatgaacttgaacttaatttttaaagaacagacattaaaatttaacaaagaagaacaagaaacatatttatttttacaacaacataataacgattgggctaatatttttaaagagatgattttacaaggaagagataaagtcactcagagattagtcacatcaatgcatcgcgaaaacttagttaaagcgcgcactcaaagtaagaaaatattgagtcgtgatttgattatgttagatatctcaacgactcatatactagaaatccagttcccacaagctaagcaaacattatatgctcctatcactggagaacacgcctttgatcgaattgatgttgaaggccctttctacattaaggatgacattacaaatacgattacacgagtacaccatccaaatgaaattcttgagtgtattttaattgaagcaccagatttaaaaaatgctgctagtgatcaatttcagcaagatttaataaacagtgcaactaatatgacatttgcaattagctatcaagcactgtcaatgcaacatgattctgcacctttatttaatattatcgaaaatagcgaagatagttacttgcgttcagagcaagccgttattgaaggtcatccgctacatcctggggctaaattacgtaaaggtttaaatgcattacaaacattcctatattcttcagaattcaatcaacctattaagttgaaaatcgtactgattcacagtaaattaagccgtactatgtcactgtctaaagattataatacaactgttcatcaactatttccggacttaattaaacaattagaaaatgaatttacggcaaagtttaactttaatgattatcacattatgattgtacatccatggcaattagatgacgtattacattctgattatcaagcagaagtagataaagaattaatcattgaagcaaaacatacgttggattattatgctggtttatctttcagaacattagttcctaaatacccagctatgtcgccacacatcaaattgtcgacaaacgttcatattacaggtgaaattcgtacattatcagaacaaacgacgcacaatggtccactaatgacacgtattttaaatgatattttgaagaaagatgtcatatttaagtcctatgcatcaacaattattgatgaagttgctggtattcatttttataatgagcaagacgaagcagactatcaaactgaacgaagtgaacaattaggtacattatttagaaaaaacatataccaaatgattccacaagaagtcacaccaatgattccttcaagcttagttgcaacctacccatttaacaatgaatcacctatcgtgacattgattaaacgttatcaatcagctgcatcattgtctgattttgaatcatcggcgaaatcgtgggttgaaacttatagtaaagcattgcttggtctcgtaatcccattagttactaaatatggcattgcattagaggctcacttgcaaaatgctattgcaacattccgaaaagatggtctattggacacgatgtatattagagactttgaaggtttaagaattgataaagcacaactaaatgatatgggatacagtacatctcatttccatgaaaaatcaagaattcttactgattcaaaaacgtctgtgtttaacaaagccttttattctaccgttcaaaaccatttaggcgaattaattcttacaatctctaaagcatcaaatgattcaaacttagaaagacatatgtggtgtatcgttcgtgatgtactagataacatctttgatcaacttgtactttcgacacacaaatctaatcaagtaaatgagaatcgcataaatgaaattaaagataccatgttcgcgccatttatagattataagtgtgttactacaatgcgtcttgaagatgaggcacatcattatacttatattaaagttaataaccctttgtatcgagaaaataattaaaattatagaatttcattaatcatgaactcaaggattacattaacttattaaatacaatctatacaaatgagagtataacgcatctcccatattcaaattattaaaaatcacaaaaaagctcggcacttaaaatgagtgccgagcttttttatcgaataacttattgtaaaccttgtctttcttggttattgttttcattatttttttcgtgtttttgtttccattctttttgagtcattacatcgtcaacttgcatgttaacttcaacaacatctaaaccagtaatatatttaacttgttcttttactaattcagttactttacggaagattttaggtgctgattcaccatattctaaaattacttttaagtctacagcagcttgtttttcaccaacttcaacagatacaccttgtgtaacgttgttgccacttgagaatgcattagtgaatgtatcagttaagccacctttcatgtctaagatacctttaacttcacgtgcagcgataccagcaattttttcaacaacttcatcagagaaagttaatttatttttgaattgaggctcttgattttgttcttgttgtttttgacgctcttctctttctttttcgttaacaccagtttgattgtcgtatgcttgttttgctttattgttatctacagtcataatagattctcctttaacttattgtttttttatatttttttaattaaattctaaattgatgaattaactccatcgatttaaaaaattcataaaatcttgcttacggtcttttatatacccaatacccacaccaattaaacataaaacgatgataagtattgttttccaaaaacctaacgttaagaataatatcgcgattaatagaaacgctaggaaaccaacgattctccatttaaacacttttaaaaaattaatcacttgttgtgtagagtcttgtccgttttggttatgattgttagccatgatatacctcccttacaacactcgtggaccagaagttttctgatctctcacattaacttctaacttacgtactggcatttctgtgaaatattctacattctttttaatatccgcacgaattgcttcagttaaagattgtacttgaacattatttggtacgaaaaagtcagttttaatgtcgatataagatttattttttttgttatatagttttgcaactacattcggttgtcttacttggtcatattttgcaactgtatcaaatgcagttttttcaacagctttacgagatacgtaaacatgaccatcatcgaagtctttgtataatccaggttttcgatgcgtaggtttgaagatactaaatactaatataagacctattaatatcaatagtgcagcaagtgaaataagtaatggttggaaccattcaaattgaaggaagtagtcttgatattcagttatacgtccatcttggatatacatgaataacaggaaccccacgattactactattaataagccaaggataaagtttttaagtcgtttcacccctaacgacacctccttagttaaagttaatttaaaaacatattaaatatgtacccatcagattttttcttaaacataataaattaataactataaatttatttttaatatataagatgaagtaccatttagtaatatattccctagttcatattaatgaaacctaattgttaattaattttcgtcaatatgttttgaagaacgatattctaaaatatctgggtcacgatgtttaattaaaaccttattactatttctcggtttctcctcactcaaagattttaaaagcgaccatatcatcgctataatgaccacggaaaatggtaacgcagcaatgattaataaattttgaatcgcttgagtaccacctgtgtagatcatgatgattgcaaataatgccataatgataccccaactcactttgacaaatgacttcggattaatatcaccacttgaactcaacatacctaaaacataagttgccgaatccgctgatgtaacaaagaaaatcataataacaagtaaagtaattaagcttaatacaaaacctagcggataatgttgtagcattgcaaaagttgccgtttctgtcgcagctttagcaatatcggcaatatgattatcttgtaagtaaattgctgacgcgccgaataccgcaaagaatataaagcaaactaacgccgggacaaaaagtacacctagaataaattctttaatcgtacgtccttttgacacacgtgcaataaatatacctacaaatggtgcccaagatatccaccatgcccagtaaaagattgtccaattttgtaaccattggaatttttgaccgccagacggaatgcgtaaactcatactaaagaaatttgcaatataattacctagaccattcgtaaatgtatttaaaatgtaaagcgttggcccaacaataaaaagaccaataagtactacaaaagcaagtaacatgttgatattactcaacgttttgatacctttatcgatacctgaccatgctgaccaagtaaataatatggttgcaatgacaatcaagattacttgcatcgtgaagttactcggtacattaaataaaaaatgtaaaccttcgtttatttgcaatgcaccgaaacctaatgttgcagcaacgcctgttactgtagctatgactgccaatacatcaatggcaccacctaaagggccacgcattgctttttcacctaataaaggcgtcaatgtagcgctgactaagccaggatatcctttatgaaagctaaaatatgcaaacacaagcgcgacaataccatagactgcccatgcatgaataccccagtggaaaaatgaaaactgcatcgcatcattaattgcagattgcgtgccagctttatgaataggcgttaatttgaaggcatgactgattggttctgccgttgtccagaacacaagtcctattcccataccagcactaaataacatggcaaaccaagatggtaatgaaaattctgggtcttcaccttcttcacctaatgtaatgtttgcgtatcttgaaaataaaatatacacacagacaaataaaataactaaaacgagcaataaataataccaagaaaaatgtagcgcaataaatgtagtaatgttttgcgtgagtttttctaactgtttcggaaatatggcaccaaaagcaacaaatatcgtacaaatcactaacgatacccaaaacactagacttactgatttatttttcataaatacaaaccctttctgtgtaatggtaagttcatacccacaactgcaacattttaatcatttgtaattttatatagacacaattaataatgcttcatcttttaaaaatgatatataaaacacactcaaattatttatcaatgaacaacaaagtattttattgtgtttaagtaatgcctttctaatgcattattgaattgatacctgcaaagttgccatatttccgtttagaatcaatagtcgctaaacacaaaaataagtcaccctatacagtattttctgcataaggcgactttacttactaaactatatattaattactaatttcccaatcattgactgtttttccaataattgatgtgcttgatataagttttcaggtgataaaccttcaaaaacttgtgtcgttgttggttggtaatgtcctgattctatatttttcgtaatatcttctaaatactcatgttgtttaatcatatcaggcgttcgatgaattggacgcgcaaacataaattcatgtgtaaatgttatactttttaattttaatgcatttaaatcttgatcttcattaaaagctacgatagttgtaatatgccctaatggttttatcagttcaatcatagtattgtaatacaagtctgtattataggtgcaaaatatataatctactaatggaatttctttttctttaaattgacgcactaaatcctctttatgattcaatacgatatctgcgcccatcttttcacaccactctgttgtttcttgtcgtgatgctgttgtaatgacagttaaaccataccgtttagaaatttgagcggcaatacttcctacacccccagcgccattaatgattaacacggatttacctatattttctgaaggattatgtgaaattttaaatgtatcaaaaaacgtttcatatgccgtaataccagttagcggtagactaaccgcttcattagcacttatgttgtgtggtgcttttgcaactatagcttctgacaccaattgatatgtcgcatttgatccttgtctatttggcgatccagcataaaatacaacgtcacccggactaaataatgtaacgtctggtccgatagcttcaacagtaccaatagcatcaaaaccaagtacacgaggtgcttgagtgacttccatttgtcgttgttttgtatctacaggatttacactaatgctatttactttgactaagatatcatcgttttctggcgttggctttctttgttcgtatactttaaataaatttccttcttccaatttaaagggcttttcaaatcctatcattttcatatcgtttcacctcatttatgaacttatttcttattatacaaaatagaagccatgtgtgcttatatcgcagcatcatgacttctttttcatttgaatatataaataattacagacgactttcgtattacattttagacttatttataccatgttactgaacaaatttgctttagctaagaaagttattaaattttggtcaattaacaaagttggtttgttaaaacgtatactttattattccgttactttaataacttgtttaccaaagttatcgccagtaaataaatttttaaatgcatgtggcgcattttcaaacccatcttcaatggttacttgtgactgaattttaccttcttgaacccattttgcgagctgttcactagcttctttaaaagcattagcgaattcacttactaagaagcctctcatcattacttgcttcttaataagcgtaccttgaatacgtggtccgatatctgcttcaggatgattatatgaggaaattgcaccacatactggtacacgtgcaaaacgatttaaatgcttaaatacttcatcgccaactgtaccaccaacattttcaaaataaacatcaataccatctggtactgcttgtgctaacgcttctgcaaaatcctctttcttataatcaataccagcgtcaaagctcagtgtctctgttaaataatttacttttttgtcgccacccgcaatacctacaacacggcaacctttaatcttagcaatttgacctacaactgaacctacagcgccagatgcagctgaaaccacaacagtatcaccatctttaggttgtccaatatcaagcaaaccatgatatgctgtttgtcctggcattcctaaaacacttaaatataaatcaagtggtacatctgtcgttggaactttagtaatttgatccgcttgaacatgattaatgattcgccaaggcaacatacctacaacgacatctccttttttataatctgcgagtgtcgaatcaattacttttgcaacgacatggctaacaatcggtttaccaatttcaaaaggctgtacatacgaatctgccttagtcatacgtcctctcatatatggatccactgaaatatacagcgtttgtacaagtacaccatcgctctcaagtttaggcgtgtcaatatcttcaattttgaatgtatcctcttgaggcatgccttctggtactttattaaaaagaatttgtttattttgcatcatttatcacctttctttatttgaaacttttacttatttgttacttaagcgttaagtttgaattgtgtcttcgtgatgtctgtatgcaaatacattcttagttgttatattttgacttaagcactgattcatttaacttcaagtacattatatttgctataaacataaattaaaaatgttacgacttagacattttatggaaactctcaaacaatagataatttttgaaaagctctaatattacaagcttttttgccccagaaaaactagcagttgctttattttttccataagaagtcgatcaactcattagcaacattttcattctcatgaagctgactatgctgtgcagactcaccttcatatttagattctcgataacttttcggactatttcccagtaaatattttaatgatttcgaagaactattagacactctgccgtctgaatgtgtaccatctttcaaatctccataaatatttagcacttcgatacctttacctttataaatatcttttagcacgcgtaattgctgataaggttgattcattcgacttggtttaccatctttatcaactgtgatttcattgacatcttcattcatatttaaaacaccattaaatgtccctgcaatattcacttgtttgtttaactgtggcagtgacttgtcgttaccatatgtcatcatatattgtgcaaatgttaagttccccattgagtgaccgacaaagttgaatttatcgaaattgtattcagattgtaacttagtcagtacatttttaaaccacgcagcattcttatccaaatagccttgtctgttattttcaagttcaattttcacaataggattcactgcatctttacttagtttccctttaaatgtcactgcaccatcctttgaaacgtaagcagtgatgatatctttagttacccctcttttttctgcttgcttcaccataaacttttcagaattggcactaccaccaaatccatgtaagaacaatgttggaattggctttttaacaaattgctgttgttgtattttaaatgtttgtgcctgtcgttgactaaacaccaccgtaataatagtgcctataataatagcgaccgctaacaatgtcgtactaattacaaaaattttcttcacacttttaactcccattcatgtcttttatttaagtataaaggatgtgattaaaaatgtcctttagttgattttgaatacatcattaacttttaagatgactttggaaaattgtccgttaaagtttataaattgattgcttatttagctttcaatggtgtgtctcccattgattaatataaaaatatgtatatgcatgtttaatttatctctttttataaataaagacctaccagcactcgactgataggccttttaatatctttaattatttaatttcttttgtttcggctaactctttgtaccaataagcacttttcttaggatagcgttcttgagtctcaaaatcgacatagaataaaccatatcgtttttcataaccatttgaccaagagaacacatccattaatgaccaaataaagtaaccttttacatttgcaccatctttaatagcatctgcaataacgtttaaatgttgtcttacataatcaatacgtgcatcatcatgaactgttttttcagattcaataaattcatctttatatcctaaaccattttcagtgatataaatcttataatagttaggataatctttaacaacacgcatgatttgatcatataaaccttgaggatagatcatccagtcccagtctgtgcgaggtacgtcgacatcaaattcacgttgtccgacacctttaagttggtatttagaaccgcctttatcacctgtcgcattatgcgtgatttcagattctccatcgtaacctctcatccagtcactcatgtagtaattgatgcctaagaagtcgtttaaatctttggctgcatctaaaatggcataatcttcatctgtaatatttaatttaccgccattaacagataagatatgttgcacaccttccatcgtttcacgagaatacttacctaaatatgttgcatctaagatgaatttgttatggatgatatcttctaattctgctgcacgaacatcttcaggatttgatggatcgaacggatattttgttggcaatgcgtgtacaacaccaatttccccttgatagccgccatccttgaataatttcactgctcttgcatgagcaaccatcatattgtgatgtgattggaatactttttcaaaatcatatttaatacctggagggaatttacctactaaatattggccatcaccaattggtccaatttcattgaatgtagtccaatattttacttctgggaattctttaaaacaatattcagcataatctacaaagtagtcaatcgttttacgatttagaaaatcgccatctttgtgtaacacttctggtgtatcaaaatgatgcaatgttacaaatggttcaacatgacgtttatgacactccgcaaataacttatggtaatactcaacacctttagggttaacttcgccatatccatttgggaagatacgagaccatgcaattgaaatacggataccattaacaccgaatttttcacttaattctaaatccactggatatctgttataaaaatcactcgctggttctgcagtgtaccaatagttttcttctaaatacgtatcccatgctacacgacctttaccatccgtatttgtcgcaccttctgcttgatatgctgctgttgctccaccaaaaataaaatcttcaggtaatgttttagtcatatgaaaaactcctattcttaattttcaaattgttgttgaacgaaatcaagggctgcttggccatctcgtgtcaatttgatatattcagcaccttgagtcttcgctaatttaatacctaatctatctgtatcttgcttaatatcttcatagttagacgcaacttgtggcgctaaaatgattaattggtactctttcataatgtccatatgtgcgccatatccgccagctgctgctttcactggcacatgatattcttcagctgctttattaagtgcattggctaataatccacttgtaccaccaccggcacaaagtactaagacatttgtttgttctgtgatatttgaagctttagctgcatcgtctgatacaccacttgccgctaaaattgaatcagcttttttcgtatcaaagtttgctgtaactttttcttttaaatctgaattactttctttacgtccttcttcttcatcaagaatttcactatcataaacttttaggaatgggtagtaaataataatatctacaacaatcaaagtaatagctagtacgaatgaccataaaccaaaacctgtacccatgataatgcccaatggacctggtgttgtccaaggtaaattcacactaaaactattcattcctaacacttcaacgaaaagtttaaaaatccatacgttaacaattggtgctaatacaaatggaataaagaacacaggattcaatactagtggtgcaccaaataaaattggttcgtttacaccaaagaatgttggtacaactgatgcacgtccaatcgctttgtttcgtttagatttcgtcatccacataaacatgaatgggacgaccaatgttgcacccgtacccccaaatgtaacgataaacatttgtgtacctgatgtaataattttatctgcgtgttctccagcttgaagcaacttgaagttcgcttcgatattcgcatatgtaatagctgcaattgctggctctactattgatggaccatgaattcctacaaaccagaataatgcaaaggcaccaaagataattgtgacaccaatccatccatctgctgctgtaaataatggttcgaataattttaaaataccttccgctacatttgatttaaagctgttgcgaatgactaaatctaatgcataaagaatgatgattaccgctgaaaatggaattaaatccttaaatacttgtgaaatattcggcggtacttctttcggcattttaattgtaatattgcgcttcacacagaagttataaacaataacagttacaaatgctgataaaaatgctgttaataaacctttagttcccataaatgcacttaagaatccaccatctttggctggatcagaagctaagaacaagaatccacacatcgctgctagcattgtagaaataaagttaatttgatttgtactttctagcttacggttaaatgaatctgttaaagatttcgctgtcgttcctgctactaaaaatgctacaagccccatcgtatagttatatggtttcattaaaatggcttccatgcctttatcccatttaaaaccaaatatatttggcacgtatgcaattaatagaaagatacttgagaataagatgacaggcattgcagaaataaatccatcacggatggctcttaaatatatgttacgtgataatttctcgaaaaatggcttccctttttcaatttgtgcgatcaatttttgcatcattgtcatcaccctcttttataaaattctaataaatgcttcattaaatctttcagtaaaattgttgtcattaaatggtcttgaccatgcatcatcgtcacactgtatgcaatatcatcaccttgcgcttctttagctaacaagcttgtttgtgctctatgcgcttcagcaatgcaattgtttccttcttcaatcaatgcatctgcttttgcaaaatctccagcttgagctgctgttaatgcttctaaaaacttagaacgtgcatcccctgcaaatgcaacaatttcaaaacctaataattggacttcttctctattcatagcattaatccccttttatacttattttctttgtttccaagatgtcgcagtatcttttaatactttatttaagtcgtcaatatttttgaaaccagttgtacgtaaccattcacgagcagcatcttcaccttgttcaatgtatacttgaacagcaccagaccatgtagcacggccacaaagtacaccgttgaatttagcaccagcttcgtgagcaaattttaaagtttcttggaataattccgcagaaacaccagcacttaagtaaatgtatggtaaatgagttgctgcatcttgatctttaaagtgttgtgccgcttcctcttttgtataaaccacttcaccttcagcaaaaccttctacatacttcatgtttactggtacttcaactttcaatacatcaacattaaagcgtggttctgagaataatttcattgcttcgttaacctttctaggcttaacttttgcgaattcaacactaccgttatcaggaatgttgtcatcgtatgttaatacttctaaaaagaatggaatatcttctgcaacacattctgaaccgattctttcaatgtatgctttcttttgaacgttaatttcttcagtatcatcaacatcatagtaaagtaagaatttaacagcatttgcaccttgttcttttaaacgttttgcagaccactctactaaacagtcaggtaaacgacctttagcgtttacgtcatatccagttttttcataagcaagtaataatccacaatctttgttacgtgcatctgaagctggtaaaccatattcaggatctaataaaattgaagatgcatattgtgttaactcttccgcaactaatacttttaattgttcaatttgagctacagttggctcttcagtttgatgttttgccatcatgcgctttaaagcaccacgttgatcaaatgctaatgcagaaatgataccttcgttattacttaattgttcaattgatgcgattttttgattcgattttgacattttttacacctctaaaacttcaatttgattgaataaatcatcataattatttaaattgacataacctgtttgtgcttcttgtgcattcagcatgcctaaagtattggctttttttagtaaatcgtggtcgttttcatgattaagaattgctgaagtaattcctgcaactgtagaatcacctgaaccaaccggatttaatacacttattgtcggaatattcactctatagaatgtatgattgtgcttagcgaatgcaccttgtgcacctaaagacacaataatccactcaatcccttcgaataagggttgtgacactgcctgtttcaaactttctaaactttcatcaagtggctggttaagcaactgatatagttcagaaatgtttggtttaatgactgttggcttatatggattttccaaaactgtttgcaaagttgcacccgagcagtctaatatcacaggcacacctttgttttggcatcgttcaatgatttgtgcataataatcttgatttaatccttttggtaagctacctgaaatagcaactgcttcaactttttctagtaattgctcaaaatgtttaataaatcctgcagcctcttgattatcaatctccggtccctgctctaaaatttctgtttgttgtccttcatgtaaaattgcaatgcaatttcgtgtttcacccttaatgttataaaatgcatgcttgatgccggcatgatctaattttttagcaataaattgacctaattcaccgccaataaaaccactcgcaaggactggctcacctacttgcgcaagtactcttgttacatttaaacctttaccaccagctgttttacttacttcttgaacacgattaacatcatctaatttcaatgctgttaatgggtatgaaatatcaacggatggatttaatgttaaagttaaaatcatatgtgtcgtcccttaatcgtggtattcgcctctgtcccatttttctaagaattcatcaaagaaatgtggatcagcttgatctgcattgcttgtttctaaatgtttaattttagcgattaattttttgttctcttcagttggtttatattcagcattaataaatgcatcaataatatcgcacattaataactcaccaataatacgtccaccaaagccaataacgttcgcatttaattcttctttagcatataacgctgatgtcatatcacgtactagcgctgaacgaacgccaggtactttatttacagcattgttaataccaacacctgttccacaaatacaaacacctaagtctgcattaccgctaacaacttgttctccaacttttttaccaaaaattggataatgtgttcttgtgaaatcgtatgttcctacgtcaatgacttcatgtccttttgattttaaaaattcagatacacgcatttttgtatctgtaacaatatggtcgcatcctaatgcaatcttcatagtaatttttcctccttagcacattttattaagcatatctacgcggatttggtgtctaccaccatcgtatttaccttcaacaaaacctttaacgacatttttcgctaatgtgtctccaacaatttcagatcccatagtgatcattcttgaattgttatggcctctagtcatatatccagagcgttcatctgatacttcagcagcaatcatgcctttgatttttgtagcaaccataaagctacctgcaccaaatgcatcgataacaatacctaagttaccttcttgactttgaacatcttttgctacagccaaagttgcatcaacaaagtcaacttcctgtccttctgttacgtcaacaacgtcatatttattgtctaataagtatgatttgatgacttcttttaatcgtttgccagcttcatctgaaccaataataatagccataataagactcctttttactttaattttgaaatacctttcttaaaatatgacatgtttatttgtaggttatgaaaatcttgagaaaaggctttcaatttgattacgtttaaattataaacataaacaaacaataaatcaacataatatgtttataatctgtttgtttatgacgtattttcaaacaataagtgaacattcaaattgtggtgttattttaattaggtattcgtctgaaattgtagtaaaactttgtcgaggttcccgtttacataaatttgcataaaaaatagcccataaatgaatgcaaattcacattcacttatgagcatatagacacatattttaacaatgcagttatatttttaatttagtcgactacttcaatatatgttttaatcgtttctactttttcttcatcttcataatccataaccactgcagttaattcgtttaactgacaaaatgatgtaaaatcttctttgccaactttcgtatgatcaattagcaagtatttttcaattgaattacttagtgccaattgttgcgtataggcttcatctaatgtagatgtcatcacagcacctttatttactgcgttactactaaagaacatcttgctaaatcttagtttttctaacatggcattcgccatttcacctacaaacgcttctgtaatatggcgcatttcaccaccaattaaatagacacgaaaatgtgctgtttgtttttccaacaaaattttatacaccggcaaacaattcgtaataattgtgagcgtatgatgattgacttcctctgctaatagttccactgttgttcccggtccgaaaaacaaagtatccccatcttcaattaatgatgcagcttttctagctataaatcgtttttctgcaatttgacgggtatgtttttctttatgcgacatttctttatactgaaatgttgaattactgcgtgcaccaccatgaatcttcgttaaaatccctttattttccaattcaattaaatctcttcgaactgtcatatcagacacatttaaaccttcgacgatttcattcgttcttatcgtgccctttttattcactagtttagcaatttcgtccaaacgttcatgtttattcaatgtaaaattgcctcctttatttaggcgattgcgcattaccttttatgtttagacatcaattttaatatacatgcttattctataataaaaattgcgtaaaaactaatataatttaactgttcgattatatgtataattcatttttaaaaagaactgtttaaactgcgcctttgataatcgtaaaatgaatatactataataaaagcaaaagacgttataaatcattcattattttgatggggtgtttaatttggaaaatgatttagagacactaaaacatattatagatagttcgaatcgtattacatttttcacaggtgctggtgtatctgtcgctagtggtgttccagatttccgttcaatgggtggcttatttgatgaaatttcaaaagatgggctttcgccagaatacttgttaagccgtgattatttagaagatgatcctgaaggttttatcaatttctgccataagcgcttactatttgtcgatacgatgcccaatatcgttcatgattggattgcaaaattagaacgtaatcaacaatctttaggtgtcatcacgcaaaatatcgatggtttgcactcagacgctggaagtcaacatgttgatgaattacatggcacgttaaatcgtttttattgtcatgcatgtcataaatcttatacgaagtcagatgtcattgatagaactttgaaacattgtgataattgtggtggcgccattcgaccggacatcgtattatacggtgaaatgttagatcaacctaccatcatacgggcattaaacaaaattgaacatgctgacacccttgttgtactaggttcatcactcgttgtacaacctgccgcaggattaatatcaaattttaaaggcgacaatttaattattatcaataaagatcgaacaccttatgataacgacgctactttggtcatacatgacgatatggtttccgttgtaaagtcattaatgacagagtaatcagtacgtaaaaagcatttcccgagtagttcgatgtactcgtataaagatgtcacttttttaatgtcttctttattggaacatatcagttcggaaaatgctttttcttttgaagttatgtattcatttttttgagtttggaattcggagtttggttttcggaattcgacgtttagaattcgacatttggttttcggaattaaaatgagaggaaaattttaattattgcgtgcaaaatgccttggttttgtagcgattttcatttgatgaattgttttttgtttgatgttgggatgctacttttaatggtttgtcatttgtaagattaaaaataaacataaaacaagtaaaaaaataatagctgcgaatattaaaaaattagatatcttcgttatcaaattccgatattaaatcattatatttttcagaatatcttgcataatcttcattattattaaaagctagccatagacctctatcatcatataaatgatatattaagtttttagtattgttaattatatatatttcagaataattatcattctgattgatagttggaactaaccctttaaagtcttgattggatatagcttttagtaattttttatattttatatcttttatggaacacttatatgaaaactcctcgcacaaaatattatcatccttctcctttttatattctttaaagtaatacaattcatctattgttaacgatgtaaatttttttataacatttgttttcttataaggttcactataaacatatactacatgaaccaaatttatagaatcagaaggcgaaaacaaatcttcaaaaatgtttattgcattatcatatacagctaaaaaataagtattattgatagttttaccgtcctccaaaaactggtatttatcgccacttaaacttaaatgaattgcgttttttacctttctaaaattcaacttttttatgtccaaattatttatatcaaagcacataaattacaacaccttattcccttaagatttttccttctttagttaaagaagctattctttttcctttgttatttattaacttccaataagaaccaccatatgattgccctttatttttggaaatagtccatttagtttttggatatctccaggtaggatttttccctttaaccttttgagtaaatttaccaatactcacccccttatcatttaacaaacttttattaatgtttttggctatattatgagtctttactgcttttagattgtaaaaataatcgtcataaataatggcattttccgagattcaaatgttacaaagtacattgtcatatgcataatgatacctgtaattaatgtaataatagaaaagtgtatatatctcatatcgccacctgctatacaacttattagataattaattccaagacatattaattatctaattataaccttagttacgttattacataatataaaaatatataataacttatttgcttgctcctttaactttttaagagtaaaaaataacctgaaacatagactttaacatccaagtttcaggttagtgtaatgtaaattatttactttgttatattatgattaaacatctaattctctgcttgtaagtgctttaatcatctctggatcagcatgtgagaaaaattggctattactttcttctaatgtcgcaatttgttgtttatcttcttctgtaagttcaaaatcaaatatatctaagttttgagccatacgttctggattcactgattttgcgagtacaacaatgtcacgttctactaaccaccgtaaaataacttgtgcaattgatttgttatatttatctgcaatggcttgcaacaattgattttggaataattgatttttaccttctgcaaatggtgcccaagcttctaccacaacattttcttgttgaagtgctgcaacttgttcttcttgttgatggaatggattaatttctatttggttcacttgtggttgaatttgattgtgaatacctaaatctacaattcgatcaacgccgaagttagatacaccgattgctttaattttaccagtttcttttaactcttctaatgcacgccatgagccatatacatcattataaggttggtgaataagcactagatcaagatagtccaaatttaatcgttgtaatgatcgttcgattgatttgatagtatcttcatagttaacattttcaatccatactttagtcgtaatgaatagttcacttctatcaatacctgaagcttcaataccttgacctacttcagtttcatttaaataactttgtgctgtatcaatatgtctataacccgctttaattgcttctttaaccgcttctgctgtttgttcttgaggaatttgaaatactccgaaacctaatactggaatctttacatctttacttatttcaatatgattcataaaatgaacctcctttatcttgtaagtccactataaaccatggagcgaactctatagcaagccataggtttactttctctcccaaagacgttcaacattggcatcatgattatcactagcattgattttagcaatatgattatcataattatcaattttatattgtagtaaatctctcgcatcatgaattgtctttaagttttcatttaattcttcgagttgcttatttaaaatttgcttttgctgtgcttgaatattttcatttttaggaagctgcgctaatctacaaaattcgataagcgattcaatactgacgcctgcatttcgcaaatttttcactaaataaatccaatttaaatcactatcattatatattctatatccattttcatctcgattaacaggtggaatcacaccaaccttttcataatatcttaaagtgtcttgagatatattcatgagcgctacgacttctttagttttcattgcgactatcctttcagttatgtttggtcgtctaaagtaatgttgctttatatattgtcatcttcgtttgaatacttcttattttattactcaaatttaaatttgtctcttttttaacattttacatttcatcgtttttaattactttaaaattgtataacttaaatatttaaaatgatataatcactaagattgatagtatttaatttttttaaaattattttcgttgcaatttttgggtgatgcggaaaatttgggtgatcgattgtttatatgcatcaacattctttgtggattgtttgaaagtagacagtcatttgtatacgttaacgaattttgaaaaattgaatcattatttaatcataatattcattgcgcacgcgcaacacaaaaaggagacatgtcaatgacatatagaatgaagaaatggcaaaaattatccaccattacgttattaatggccggtgtgattactttgaatggtggtgaattcagaagtattgataaacatcaaatcgctgtggctgatacgaatgttcaaacgccagattatgagaaattgaggaacacatggctagatgttaactacggttatgatcagtatgatgagagtaatgacgcaatgaagaagaagtttgaggctacggagaatgaggcagagaaattactcaaggaaatgaaaactgaaagtggaaggacttacttgtgggatagtgcaaaagatttagatacgaagtctgcggatatgactcgtacctatcgtaatattgagaaaatcgcagaagcgatgaagcataaaaatactaagttgaatactccggataataaaaacaaagttaaagatgcccttgagtggctgcataaaaatgcctatggaaaagagccggataaaaaagttgctgatctgacttcaaactttaaaaataaaacttctagaaataccaacttaaattggtgggactatgaaattggaacacctagagcattaacaaataccctattattactgaatgctgatatttcaaatgatgaaaagaaaaaatacactgccactatcaaaactttcgctccaaatagtgacaaaatattatcgtcagtaggacaacctgaacaagctaaaggcggaaatttagtagatattactaaggtgaaacttttagaaagtattatcgaagaagataaagatatgatgaaaaagtctatagattcatttaataaagtcttcacttacattcaagattctgccactgataaagatcggaatggattttataaagatggttcatatatcgaccataaagatgtcccatacactggtgcttatggcgttgtactcttagagggtatttctcaaatgatgccgatgataaaagaaacaccttttaatgatagtaatcaaaatgatacaacgttaaagtcatggattgatgacggatttatgccactcatttataaaggtgaaatgatggatttatcacgaggtagagctatcagtcgcgaaaatgaaacgagtcatacagcgtcagcgactgtaatgaaatcattgttgagattaagtgatgccatggatgagtctacaaaagctaaatataaacaaattgtcaaaacttcagttaaatctgattcaagttacaaccaaaatgattatttaaattcatattcagatataagcaaaatgaagtctttaatggaagacagcactctttctactaacgatttaacacaacaacttaaaatatataatgacatggatcgtgtcacctatcacaataaagtcttagactttgcatttggtttaagtatgacgtcgaaaaacgtcgcacgttacgaaagtatcaataatgaaaacttaaaaggttggcatactggtgctggaatgtcttatttatacaatagcgatgtgaaacactatcgtgataacttctgggcaacagctgatatgaaacgtttagcaggtactacaactttagataatgaattattaaaagatacggatgataaaaagtcgagtaaaacttttgtaggcggaacaaaattcgatgaccaacatgctagcatcggaatggattttgaaaatcaggacaaaactttaactgccaaaaaatcatatttcatattaaacgataaaattgtcttcttaggaactggcattaaaagtactgattcatcaaagaatccagttacaacgattgaaaatcgcaaagcgaatgggtatacgttatatacagacgataaacaaacaaccgcttccgataatcaggaaacccattcagtctttttagagtccacagatacaaaaaagaacatcggttatcattttttaaacaaaccgaaaataactgtaaaaaaagaaagtcatactggtaagtggagtgatataaataaaagtcaaaaaacagaagacaaaactgatgagtattatgaagtaactcaaaagcattctaattctgacaataaatatggatatgtgttgtatccaggcttatctaaagatgtctttatgacaaaaaaagatgaagtaactgtcgttaagcaagaagatgacttccacgttgtgaaagataatgaatcggtttgggctggtgttaattacaacgatagcactcaaacttttgacattaatggtactaaagtcgaagttaaagccaaaggaatgtttattcttaaaaagaaagatgataacacttatgaatgtagcttctataatcccgaatctacaaattccgcttcagatattgaatctaaaatttcaatgactggatactctattacaaacaaaaatacgtcgactactaatgaatccggcgtgcgctttgaattaactaaataagcaagaaaatctcggcactataccatttttatagtgtcgatattttataagtatcgccatcattcaccttgtaatccgcagaccacatcacccttgataagttctcgattatttaaaaatcgatttaccaaggcattcagcaagtttctcctcatttaattattgtaatctgactacttataattatccgccatttttttaattatttgtttcattttatttctaatttcagttggttctataacttcacacttatctccaaaacttaaaattaatccaaagtaatatgagttgtcgatgaatgggaagtcaactacataatatcgattattttcttgcctaaagctatcgtaatcacagaaatctagtaaacgttcaacaattgattcgtgtacgcgaagtttaattgtcatttttaatttttcaaaaattctatttgtagataataatgggtctatatacatttttttaataaatttgctttctaattcttgcaaatgtataactcgatttaatttaagtaatctaaaatcatctcttaaataacaataaacataacaataccaatgtcctgcttttaaaataagttgatatggttcgacttctctttctgttttatttcctaaatgattaatatatttaatttttaatacctgattgctttgtatagcgtttttaaatttaatcagttgttcatctatatttcttaattcattccaatgattagaatctaattgaaattgttctacttgtgtttctattgaatttagcttatctttcggtattaaacttttaatttttagatttgtgttaaaaaaatcattattctttagtttttccggaaaattagagttactaattaaaagacttgctaattcattttcagtaaatgtatttttatctattttaaaattttccataatttcaaagccaccaccgacacctggaatagaataaacaggtattccagctatatttatcgcttctatatctcgataaattgtacgttgtgatacttccattaattctgacaactcatgagcacttacacgttttctctcattcaaaatcaaaataatactaattaaccgactaattttcatacaaattccacctgtcttttaattgttgccatacagttggtcactttaatttcttataatgatatcaaattaaactacaggaggataattatgaagaatgtatatttttatattatagatggtttagcagactgggaaataagtaatattttagccgagttaaactctaagcgattctttaaaaaagatgctcaaacaataaacatagaaatggttagtaactcaaaaacacctattactacaatgggaggtattaatattaagcccgaatgtttaattgaggaaattagtatttctaaagacacttttctaatactacctggctcagacacatggaatgattcaaaacatttacctgtaataaaaattgctaaagaagttttatcaaatggtggctatgttgcggctatatgcggagcaacaatttcgctagctgatattggtatattaaatgcatattatcatacgagtaatgactcattatatctagaaagtttttcttcaaattaccatggacaaaaattatatattgatcaaccatctgtatctcataaaaatttaattactgcaagttcaactggcgcactaatgtggacaaaagatatactacatcatctagatgtatttaaacattctactttagatgcatggtttaactattttagtaccggcaattcaaagtattactttgaattacaacaaacattaaataaagatgataattaatgatttaaaattatagtaacattatggtttattataattcctgtttcaaaatacacgagtcatattcctcgttaaaaactattactaaaattcaaaaatataaaaaaatcaaaaagtatgttttaaactttatgaaacgtgttatataaatagtgtaatataccacaactttaaaaggagattgagatatgaaactaaaatcatttgttactgccactttagcattgggattattatcatcggtcggagctgcattacctagtcacgaagcatctgcagatagtaataacggctataaagaaatgacaatggatggttatcacactgttccttacacgatttcagtagatggtattactgcattacatcgaacttactttgttttttcagaaaataaaaaagtactttatcaagaaattgacagtaaagtaaaaaatgaattagcttctcaacgtggtgttacaacagaaaaaattaataatgcacaaacagcaacttatacacttactttgaatgatggtaataaaaaaatagtgaatctaaagaaaaatgacgacgctaaaaattcaattgatccaagtacaatcaaacaaatacaaattgtagttaaataataatttgaaaatgaaaatagttacacagggcaaacgctgaaaaattgcgtttgtctttttagttattgaacttgtaaattattgttgtttgcttctcctgataacagattggcctatacaattgtaaattcgatatgaatgtctaccataatttattatctaaacataacagcaaattacaaatagctagaacacaaataaatcccctcactaccgttaatagtgaagggatttattttattacttatacgtgatcacaaatatatttgctctattgtaatcatgattaaccgtattaatcaaccttttatcattacttaatttccaaatcgaacattatgaagtcaatgcttcaatttttataatccatcattacatttccgcattcattattcagcttctctaatttcgtctgcaatatctttatagtcaatatttgcatttatgaaatcttcatcttgaattggaaaatgctgttcaaatgtttctatattttggatttctaatttaacatcttctacttcaaaatctaagacatgtccgccaaagttacgatcatcatttgcaaagtgtacatggaatcctgctgatccgataccatggaatagttctggtgtaaagaacccaacgactgaacctttgacgtatgtttcagtttgttcaggttgtcttctagctgaatcaattaaacgtgtataaggtggctcttgtgccggcatcatacgtacatgcatttttttaaataagcctgaaatttttactgcagaaaataaattttcactcaacatcttttccttaatttctgcaaaaactgcttcagaagatttatctttcgtttcatagcttgtatctgctacgaatttagttacagttgcatatggtgttaactcatcaccttttaattccacaaattctttatgttcatttgcatgataagcttttccatctaaaaagatgacctcgccatttgaacctgttagtgtagcgatacctaaatcaccatgttgcaataattcatttattgatgcagttccttttaataaacctgccattaatgtgcctaatgtaccatgttgatataaaacactagccataaaatttcccactcctcattaacatttatctttgttttagttaaatacgtcaggtaacatatttgttgaaagtttgatattatctttataatttacaggtatatcaattaatactggaccatctgtttcatagccctctttaattgccgcttctaattcttcttgattagtaactcgtaaaccttttgcgccaaatgattcagcatattttacgaaatctacaggaccgaagtcgacacctgatgaacgtttatatttcatttcttcttggaattcaaccatgttatattttccatcgttccaaataagttgaataatgtttagatttttacgtacggccgtttctaaatcttgtgatgaaaataaaaagcctccatcgccagcaacggatacaacttgcgtattagggcgtacaagcgcagctgaaattgcccacggtaatgctacaccaagcgtttgcataccgttactaaataataaatgtcttggattgtaacttctgaaattacgtgccatccaaatatagtgactaccaacatcaactgtcactgttgtttcatcagttaataccttttgcatagattctataatttcaactgggtgtaagatgccttcttcatgcgtcgctttaataccagtttcttgatcaatatgcgctcttaactgttctaattcatctaaatgttgttgatttataaatggttcatctactttgtcagaaatcatttcaatcgttttagcaatattaccaatcaactctttttttggttgcatataattagtaatttcagcttgaacttcgtcaatattgattatttgcgtatctaattctttattccagttactagcctcatattctataggatcataaccgattgtaacaactaaatcacttttacgtaataattcatcaccaacttgattacggaataaacccactcgcccaaagaaatgattttctaattcacgactaatcacaccagcaccttggaatgtttctacaacgggtaaattggtacgctctactaatttgcgaatagcattcgtttcgtctgcacttgaacttctcattccagctagtaaaaccggaaatgatgcatttttaattgtttcaatgacatcattaatatcttgttcacttggtacacctaaatttggcttttgacaaagtgatatcgccttagattcaactggtgaagaaatcacatcttgtggaatactaataaaacttgcgccatttttccctgaagtagcaattcgaattgcatttgtcataacttctgataatgattcaggatcttgtacttcttcactatattttgatgaatattttaataaagcagcattatcaatactttgatgcgttaatcgtaataaatcattacgtttcacttggccacctaacgctaatacaggatccccttcagatgtagctgttaatagtccagtcgttaaattacttacaccagggccacttgtaacaagtactacacccggtttgcctgttaatcttccaataccttgcgccatcattgcggcgttttgttcatgacgagtgacaataagttcaggaccatcatcaattaaagcattaaatagatagtcaatctttgcacccggaataccaaaaacatattctaccccattatttttcaaagtatcaataaccatatcggctgcagtgtactttttatcagtcatttatattcatttcccttcaaatgtgatgtgtattacatataattgatttgtgaattgtaatctaatgatagttatgtaaaattaataatatttatcaaaactttacatatataattagatttgtaatacataaaaattgccttcagtacattatatatcctttgtaagatgaataaaaatcgttatttgtaatactaagtattccaaaaatgcatgagtagattttgttcagtgtgataatgagggatattggattgattgatgtagaggattgttagcatatttggggatgaggtgtttagtcaatggcggtttgaaattgtcgttttatggtgggctgaaaatgctgttttatggcggtttcaaaatggtgtttcgataaaaaagtcacagcaagatttagatttaactgtgacttatacatttcataattatattagcgattgtttttatagttataaatgatagatgcagttcctaaacaaattaagaagataatcattaagtatatagaaaagttatctgttttaatataaaacctaaaaagtagaaacaccagtatcgcaacaataaaataaacaggaataaaagctttcttccaaaatatagaatctttcaattaagtcactccttattttgataacactcttaaatcatggttcttgagttatcgtccagttatcatccgttcgctctttcccttgaacctctatgattagaatactttcatccagttatcgtccgcccctcccgcaagctaaatgacaatttaataatgtacacttttgattgtataagcatgtacaaattatacgtgtaaatcaataattcatagttgaatttattctattcctgagacattaaataaaggaacgttcattatactctacacattccatattccccacataaacgcaaaaaaacaccttgacataacatcgaggtgttttgtatatatcgtccgacaattaacgttttgagaattgaggtgaacgacgagctgctttaagatttggttttttacgttcaaaaaactttagggtttcgtacaattgtatagactgtcgtaagccttgatactaaaggatttctaatttttccgattgcatagtattgcaccaaatatcactcaggggtaactaaagggtaactaaataaactgctgtccggttgtatatactcttgtatcgtccggttatcgtccggtcgtaaatatattgatttatcaatgtttttatgtatatcaataggttatcgtccggttatcacatgatgtatttattagcctctaaataaataatatctagtacctggacctctaccttcggatccgataatttctaatttctttagttcagcaattaactaagatgtataaattttttcgaagtcatattgtttcttgaatttcaagtctacttgctaacttaccatctgatagaaattctacaatctctgtcaacttctgattagtaggtattttatttaacttgtaattcttattaaataatactactcgaaaatccccctctttactcgaaagctcacaaaacccttgatatcattggtttcccatgattttttaatatttttcttttgagttactcgaaaatttttctctttactcgaaagctcacaaaacccttgatatcattggtttcccatgattttttaatatttttcttttaagttactcgaaaatttttctctttactcgaatccgagtaaataatatgttctctttggatcattcttacttgatccatgtgtcgatataatattcatttcctctaattctttcaatctttttctagcagtaggaacagacctttgaataatattagcaattttagatgctgttagttcgccttgattatataaatgtctcacaattaattcttgttgctcatttaaactttcaaataattcaggtgttattatattactcactctccctgtttctctttttttccttgctattatgttattcttcaaagctagttgtactgaactattattaggctctgagtatacaggatcatctaaaaaatattccttcatttcgtcaaatatacgtcccacgccctcatttgattctctcacccatttatattgagttaatgctgcagctaattttggattccttgaatatctttcttctttaatattctctaacgtaacagaagcaggcagtgcacccgggctactaatttctaatctgtcgtcaaacatttttattcttatatgatcgccttgattatcatatctgcgatgtacaatagaatttatcattccctcaaaccaagcaaattctggatattctggcaaagttacaaatcttccctctttacctaaaaaagtatattcacgtaattgtgtattgataaaggctctcgcttctcttattgctactggcaaagctttatcaaaagtaatatcttttacaatgttaagtcttgtcccagattcttcttttgtaccttcatacctcataaatcgaattctagcgcctggtaaataaacattgatgttattactaaacaataacaaacctgcaactgtcaatttaccttcacgcataaatcctctagcttttaataatttttcattatctacgtttgtattaagtaattgcttaaattcatcaactagttcttcattcacatcttcaatactagaatactctactaattcttcttcgaatcttcgtgaaccacggtcgtattctagatttgtaatttgattgtgtgtcagttttctacttttatcgttaatccttaaatatactgaatcatcttttaaggtgattatggcatcataactgggttcaatgtcgaaaataagaatttcatccatagttccatcgcgtttcttcacttctattatttcatatgtatatttaggtattctatataaatgttcgaaaggtgcttcaatataaacctctttcttttttgcttttgaatgattaaatcccgaaatttctccattatcttcaataccaattaccagtttgccaccttcagcatttgcaaacgcactaatgtgttgagcaacatctttaggatttatagatgccctctttcgatctagaagctgtccttcaacctcagtttgcaaatattcaatatacttactactagtcatatataaacctcgcaatctcgcatcttattgactttattataacattcaatacgatatctatcgaatatcattacaacctctatctgcttgtcgtacgaatcccaaagaaaaacaaggtcatttcatatggtttcctaaagtttcatatcattgaattttaagcagaattgaaacaaattagttactctaggggtaactaaatggtatctaaataactctataaaaatacaaaaaacactctttggaataatccaaagagtgttgtaaacgtttcttcagttgaacacaaattgctgccgcaatttgcgaactccatctgtaaacgaacaagttcgcaacagctgcagcttaacgttttgagaattgaggtgaacgacgagctgctttaagacctggttttttacgttctttcatacgtgggtcacgagtaagtaatccagcgcgttttaaagaacctctgtattcaggatctgcttctaataatgcacgagcgattccgtgacggatagcttgagcttgtccagtgaaaccaccaccatgtacgttaactaaaacatcatagttacctttagtttcagttacatcaaatggttggtttaagtctaaaattaatgattcgaatggtaagtattcgcgtacgtcacggttattaactgtgatgttaccttcacctggtactaaacgtacacgtgctactgagtttttacgacggcctgtgcctctatattcaacttgtgccaaagtcatttcctccttctaattaaccacgtaattcgtagttttctggttgttgtgcagcgtgtggatgttcagcgccaccatatacaaataattttttaccttgtttttcgcctaaacgagtgcttggtaacatacctttaattgagttttcaattaaacgttctgggttagttcttcttaattcaccagcagtgattgatttgataccacctgggtgatttgagtgacggtagtaaactttgtcagtttctttgttaccagtaaattcgatttttgatgcattaataacgattacataatcaccagtatcaacgtgtggtgtgtaagttactttatttttaccgcgtaagatagatgctacttctgatgataaacgacctaatgtttggccttcagcatcgataacataccatttgcgctcaatgtttgattcatttgccataaatgtttgacgcataataattatcctcctaaaaaataaatgcttctattcaagctataaacagtttcataacctaatagatgatttcatttgtttcatttttaaaacgtttaatttcatttattttgttaactgttgttcgtttctgcttatatatcttgtaacacaataagtttccggggcttatcgtggggtggatataaaacaataccgttaataatcttataatttcacaagctttttgtcaatggcaatcagtcattttgtaatgattttttacgatgtattttgatatcgttaccaaagtcttttaataactcattttcatctaaataaattttctctaaatataatccttcagccggtgcagtaaaaggtacattcttacgattctttgattcaagaagttttggtacatcagatacttcatgtcgcccttttccaacttctattaaaaatgcaactaagacacgcaccatgttatataaaaatccagatccagtgacaatataatcaaagccatcatctgtctttacaatttcactttggtataatgttctaaccttactttctacttcagttttttgcgaacaaaatcccgtaaaatcatgtgtacctatgaattgttgtgccgctctgttcattttatctaaatccaacggttcaggaataaatgttttcaaaccactttgaaatggatcgcggtgttgtgcttgatatactttatatcgatagcgtttaccgacacaatcgtaacgacaatgaaaatcgtcatcgactgtaactacattgttgacataaatatcatcaggcaacgttcggttcattgcatattgccattgtgacataggtatattcagctctgtgtcgaaatgaaagtattgctgtatcgcatgtacacctctatcagtcctacttgaaggatggattctcacatgtcttttatgcatgcgttgtaatagcttttcaaattgttgctgtaccgttcgaccattttgttgaatttgaaaacctagaaaattatttccttgatacgcaatttctactaatatacgcatgaatttacactcctgaatattttaatacgaataaaataattgccattgggataatcatgattaaagataacgtatctctcaattgccatttaagctgtctgtagctcgttctcttaacattggcatcataacccctaacttccattgccaccgctaattcttcggcgcgttggaaagccgagatgaatagtggcactagtaatggaataaatgatttaatacgtgttgcaatgttccctgaacttatttcagaaccacgtgacttttgcgccaaaatgattttatctaactcatccattaacgtcgggatgaatcttaacgcaatggacattatcatacttaattgatgaactggtaatttaaacatctttagtggtgcaagtaatctttcaaacgcatctgttaaatcaattggacttgtagatagtgtcataattgttgcaatcatcacaatcccaattaaacgcagtgatatatatatcccttctaaaataccatttgtttcaatcgtgataccatgccattcaactaatacatatccacctttagttaaaaatatatgcatcattaaggtgaagattaaaaagaaaaatattggtgttaaacctttgattaggaaccataattgaatttttgctaatctcataaagaataagataagtgcaaacacccaaaggtatgttaatggtgaatgacagaaaaatattaatataataaaaagaaaaacaaacattaactttgctcttggatcaagatgatgaacaaaagaattaattggtaaatatcgccctataatcaatttatttttcatgttgccactccttatacaagcttacaaatgcttcttcagttaaggcaatatcttttaattttgtttgatgtttttgttcaaagtcatattgtaactgaacaatttctggcaaaccaatatgccaatccgccaatttttctttatctttgaaaagctcttttggtgatgtttgcgacactatactaccttctttcataacgatgacttcatctgcataacgcgcgacttcattcatatcatgtgaaattaggataattgtcttattttcatctgtttgtagtgactttagtaatcgcattacttgtcgtttactttgtggatcaagtcctgctgtaggttcatcaaccacgataatatcaggattcattgccaatatcgatacaatcgctattttacgcatttgtccacctgacatttgaaatggtgattgtgacattacatctcttgaaaagcctaaatccatcaacagacgatgggcatagtttttggcttcatctaaattcattttaaagtttttaggtccaaatatcatttcacgctctactgtgtcctcaaataattgagattcgggaaattgaaataccattccaattctttttcttacaggtctaatatatttatctttggtcttatgtgtaatagtaatgtcatcaactgtaactgtcccagtagttggctttaacagtgcattaatattttgtatcaatgttgatttaccactacccgtttgtccaacgatggcgtaatatttaccttgttcaaattctgtattaacatcatgaatagcttgatgctggtatggtgtccctttttgataggtataacttacattgtcaaagcgtatagtcatagttgatccaccagcccttcataagttaagaatgatgtttggtgtcccagcatttgatttattttgattgggaatggcaaatctagacctattgttgttaactcttctgcatggtcgaaaatttcagtcgctgtgccttttttatagacagtccctttattcataacgataacatgatctgcttccatcgcctcagataaatcatgcgtaatagaaatgattgtaatattatgttctgatttaacttttctcactaaatccaataaattttgacgtgcatcaggatctaacatagaagtcgcctcatctaatataatgacagaggggttaagtgctaatacacttgctatagccacacgctgcttctgtccccccgataatgcattaggttcataatctgcacgttctaacatatcaacttgtttaagtgcttcgctgactcttctgtgcatttcgtcgtgtggcaccgcatgattttcgagtccaaatgcaacatcgtattttacaattgaaccaacaaattgattatccggattctgaaatacaattcctatgtcttttcttaacttttcaaaattatcatctgttatagtttgattattataaaaaatttctccagatttaactttctctatgccaatcattagcttggcaattgtagatttcccagaaccgttatgaccaacaatagatgtccactgacctttaggtatattaaaagaaacatctttcaatgtgaaggatgcatcactttgatattgaaatgaaacatttttaaatacaataactgaattcttatcctccacttgtctctctcctttacgattcgtgtatctatcatattttacaatatttataaatcgctgtatatgacattgactgggtttgctatatattactagtattttctgactcatttctagtctttaaagtgttgtttaacaactaatgataaggacatttattcttctctaacaactatgtataaacgttaataaaataaatgatttactaatataggggtgaccgcgtttgattcaacgataatactttcacttcattcagttctagtgaaattgatcaaactagcttgatcatatttttagattcacactcaaaaaagtagatataaagaaatcggacttaaaaacatttctgttcataagtccgatatcttattcaataaaaaagcgcgcaccccatcataagtttgttgagttcacgctttaaatctttatttagttgatggggtactctgagctagacaatatttgtatgtggcaaacattatcgttgcactcatttgctttatataaaagtagttagtgtatttatataaattcttatactaattcgataattactgattcagcaccgtcaccgcgacgagggccttgtttaaggatacgagtgtaaccaccttgacgttctgtgtaacgctctgcgatttcaccaaataatttttgaagtgcagtttgtgtagtttcatcttcgtttaagatttcaacattacgtaaagttttagctgcattacgacgagaagctaaatctccttttttacctaaagtgattaatttctcaacaacactgcgaacttcttttgcacgagcttctgtagtttcaatacgttcactaataataagtgatgtagctaagtcacgtaacatagctttacgttgatcagaagtacgacctaattttctgtaacccatgagttaacctcctttatcaatcttcttttcttaatcctaatcctaaatcttctaatttgtatttaacttcttctaaagatttacgacctaaattacgcactttcatcatgtcagcttcagatttgtcagctaactcttgaacagaattgattcctgcgcgttttaagcagttatatgaacgtacagataagtctaattcttcaatagacatttctaatactttttctttttgatcttcttctttttcaatcatgatttcagcgttttgcgcttcatcagtaagaccaacgaagatattcaagtgttcagtcattatttttgctgctaatgaaactgattcttgtggtgtgattgaaccattagtccaaacatccaatgttaatttatcaaaatcactgctttgacctacacgtgtattttcaacagtatagttcacacgttcaacaggtgaatacaatgaatcaacagggattacaccaattggtaaatcactagtattattttgttctgctaatgcgtaacctctacccttgttagcaactagacgaatttttaagtgaccacctttagatactgttgcaattttaagctctgggtttaaaatttcaacatcactatcatgtgtaatgtcgcttgctgttacttcgccttcatcacgtacatcaatttctaaagttttatcttcttcagagtaaattttcaatgctaattgtttaatgttcataataattgtagaaacatcttcaactacattgtctactgctgagaattcatgtaaaactccctcaatttcaatatacttaacggctgcacctggtaatgaagatagtaggatacgacgtaaggagtttcctagtgtagtaccgtagccacgttctagtggttcaacaacgaacttaccgaatttagcatcttcactaatttcaattgtctcaattctaggtttttcgatttctatcatttaaatatcctccttatatacgtcgacttaatttaaaatgtttgctcagtgacctgtaacaataccatcataaattatacacgacgacgttttggtggacgacaaccgttatgaggtactggagtaacgtctctgatcgcagttacttctaaacctgcagattgtaatgcacgaatagctgattcacgacctggaccaggtcctttaactgttacttcaactgtttttaaaccatgctccatagctgatttagatgcagtttcagaagccatttgtgctgcaaatggtgttgattttttagatcctttgaatcctaatgcaccagctgatgaccatgataaagcattaccgaactcatcagtgatagttacaatagtgttgttgaatgttgaacggatgtgtgctacaccattttcaatattctttttcactctacgtttacgagatacttgtttacgtgccatttaaaatatgcctcctttacctattattttttcttgttagctaccgttttaactggtcctttacgagtacgcgcgttgtttttcgttttttgaccacgaactggtaaaccacgacggtgacggataccacggtatgatgaaatttccattaaacgtttgatatttaagttagtttcacgacgtaagtcaccttcgactttataaccgtctacaacttcacggatgcgacctaattcgtcatcagttaaatctttcacacgagtatcagctgatacgttagcttcttcaagaattttttgagcagttgacgtaccgataccgtatatataagttaatgagataactacgcgtttttcacgtggaatatctactcctgcaatacgtgccatattaatttacacctctcttttattaaccttgtctttgtttgtgttttggattttcacaaattaccattactttacctttacgtttaatgactttacatttttcgcaaataggttttactgatggtcttactttcatttttatacctccctatattatggagtgacgattatttataacgataagtaattcttccgcgtgttaaatcgtacggagacatctcaacagttactttgtcgccaggtagaatacgaatgtaattcattctgattttaccacttacgtgagctaaaatctcatgaccattttctaattctactttaaacattgcgttcggtaaagtatctaatacagtaccttctaattcaattacatcttgtttagccattgattaacttccccctttttgcaatagtaaggtaatcgtcaatagacaactttattgttacgaatctatcagtgattaattttataagttaaacaaaaattacgggaattaattatcgttaattgccactctcatctatctaatatgattaaatcatgcctcacttaaaatagaccgctaaaagttgatctattacaaatgatctaaaatatcaatgacatctttggtaacgtcgctaatatcttttgaaccatcaatatttttcaatacacctttttgatcatagaaatctaaaataggcttagattgtttaatattaacactcaaacgattagctaccgtttcaggattatcatcttctcgttgatacaatttaccaccatcgatatcacaaataccttcgaccttcggaggattaaatacaagatgatacgttgtaccacatgactcacagattcgacgacctgtaagacggttcattaattcttcttccggaacttcgatattgatgacagcatcaatgtttctgtcaagctcagacataatattatttaatgcctcagcttgctcgattgttcttgggaagccatctaataaaaagcctttttttgcatcgtcttcagaaattctttccttaacgatacctacagtcacctcatcaggaactaattcgccacggtccatataagacttagcttttttacctaattcagtttcttcttttatagcttttctgaacatgtcaccagttgaaatgtggggtattgggaatttcttgacaatttcacttgcttgagttcctttacctgcgccaggtaaacccatcaaaatgatattcataagtgccctcctaaaattatctaccaccaaagcctttatattctttttgagatacttgagcttctaaagatttcattgtttcaatcgctacaccaataacgataagtaaacttgtaccaccaatctgaattgattgtggtaatcccataaacttagttgctaatatcggtagaattgaaataacggctaagaagatagaacctacaaaagttaaacgatataaaactttagtaatatactttttggtttgttcaccaggtctaatacctggaacatagctaccttgtttcttaaggttatcagccattttttccggattaacttgtacaaatgcatagaagtatgtgaatagtataattagtacaatatatacaaccataccaacatcacttgaaggatttgcagcattcgcaatgttttgtgcccattctttatctggatagaacaacgttaatgttctaggcagtaagaagaacgccattgcaaagattacaggaataacaccggctgagttcacttttaaaggtagataagttgcctgtgaacctaatctttgagcagtttgtttcttagcatattgaatcggaattttacgaacggcttcaagtacataaatagcacctacagttaataatatcagtgacactaaaagtcctaatactttcaaccatgctaatgatgtatcttcttgcccaacgaacgcagtttgtccaaattgaattagactggctggcaacgttgataaaatacccgcaaatatgataatagaaataccattaccaacaccgaaatgagtgatttgatcaccaagccatattaagaaagcagttcctgctgtcaaaactagtgctattaataaataactcataattgactgattgataatcagcgcacctttgagataattattaaattggaatgccatacctatagattggataaatgctaaagaaattgctaaataacgagtaacgttatttaactttcttctacctacttcaccttgttttgcccattctgagaatttagggacaatatccatttgtaataattgcattacgattgatgcagtgatgtagggtacaatacccattgcaaaaatagaaaatcgtttcaaggctccgccaccaaaagtatttaataactcagtggcaccttgagaaccttggggattatcaaaagctgcaggattaactcctggagctggtatataagtccctattttaaaaattactaacattgctagtgtgaagaaaatcttgttacgaacctcttttgttctaaagaagttcacaagggtttgaatcattagatcacctcgtgtgctccacctttagcatcaatagcttctgctgctgaagctgagaatttatgagctttcactgtcaatttcttatcaagtgaaccattacctagtattttgataccagatttttcattcttaacaacaccagattctactaataaagctggagttacttcagtaccatcttcaaatttattaagttggtctaagttaacaatagcatattctttacgatttatgttagtaaaaccacgttttggtaaacgacggaataatggtaattgaccaccttcgaatcctggtcttacaccaccgcctgaacgagctttttgacctttgtgtccgcgaccacttgttttaccgttacctgtcgcaacaccacgtccaacacgattgcgttctttacgtgaaccttctgccggttttaactcatgtaatttcatttcggcacctccttgattatttttcttctactgttactaagtgcttaactttgttgatttgcccacgaatagcagggttatcttcaacaactactgaactgttagtctttttaagacctaaagcttcaacagttttacgttgtgtttcaggacgaccaataacactacgagtgagggtaatttgtaatttagccataactagttttccctccttaattgtataattcttctactgttttgccacgtaatttcgcaacatcttcagcatttttaaggttttgtaaaccatcgattgtagcacgaaccatgttgattggtgtgtttgatcctaatgatttacttaagatatcagtgatacctgctaattcaagtacggcacgaacaggaccaccagcgataactcctgtaccaggtgcagccggtttcataaatacgcttcctgaaccgtaacggccagtaattgtgtgtggagttgtaccttcaacacgtggaacaactactaaatcttttttagctgcttcaacagcttttttgattgcttctggtacctcttgagctttaccagtaccgaaacctacacgaccatttttgtctccaactacaactaatgcagtgaaacggaaacgacgaccaccttttacaacttttgctacacggttgattgtaacaacgcgttcttcaaattctttcgtctcttcttctctacgagccatgtatttgtccctcctttaaattaaaattctaatccgctttctcttgctgcttcagctaatgctttaacacgtccgtgatataaatatcctccacggtcaaatacgatttctttaatgcctttgtcagcagcttttttagcaattgcttcaccgactttagttgctaattcaactttagttgctgtagtagcaatgtcgctgtcttttgaagaagcttgagctaatgttacgcctttattatcatcaataatttgagcgtagatatgcttgtttgaacgatatacgtttaaacgtggcttttcagctgtacctgataagttagtacgaacacgagcatgtctttttaaacgcactttatttttatcaattttactgatcatttcaatactcctttctttagagtttatctattatttaccagttttaccttctttacggcgaacgtattcaccttggtaacgaatacctttacctttgtaaggctctggaggtcttactgaacggatgttagatgctaatgctccaacttgttcttttgaaataccttcaactttaacgactgtgtttttctcaactgagaaagtaatgttttcttcagctttaatttctactgggtgagaataaccaacgttaaggattaagtctttaccttgcatttgagcacggtaacctacaccaacaagttcaagtacttttacgtatccttgagaaacaccttgtaccatattgtttaataaagcacgagttgtaccatggtttgttctatcttctttagaatcagatggtcttacaacttcaattgtgttttcttcttgtttgaatgtcattctttcatttaaagttcttgataattcacctttaggacctttaacagttacatgatttccatcaaaagttactgttacgtcactagggatgtcaataattttcttaccaacacgactcatgttatggcacctccttattttttattaccaaacgtatgcgataatttctccaccaacattacgttttcttgcttctttgtcagtgattacaccttcagaagttgatactaatgcaatacctaaaccatttaatactttaggcatttcgctagcttttgcataaacacgtaaacctggttttgaaatacgttttaatcctgtgataacacgctcatcgttttgaccatattttaagaataaacgaagtacaccttgtttatcatcttctacgtattcaacatttttaatgaaaccttcactctttaagatttcagcaatttcttttttaatatttgatgcaggtaattctaatttctcgtgacgcaccatgtttgcgtttcttacacgagtaagcatatctgcgattggatctgtcattgtcattgattgttgcctcctttcagactcttttttattaccagctagctttacgaacgccagggatttggcctttgtaagctaattcacggaaacaaatacggcataatttaaatttacgatatacagaatgtggacggccacaacgttcacaacgagtgtattcacgaactgcatatttttgttttttttgttgcttagcaaccattgaagttttagccacttaattagcctcctttaaataattatttacggaatggcataccgaagttagctaacaattcacgagcttcttcatcagtgttagcagtcgttacgataacaatatccattcctctaactttacttactttatcatagtcgatttctgggaaaattaattgttctttaacacctaaagtgtagttaccgcgtccgtcaaatgcttttttagaaacaccttggaagtcacgtacacgtggtaatgatactgaaattaatttgtctaagaattcatacattctttcaccgcgaagtgttactttcgcaccgattggcataccttcacgtaaacggaaagtcgcgattgattttttagctttagttactaatggtttttgaccagtgatcaattctaattcttcaacagcattgtctaatactttagaattttgtactgcgtcacctacacccatgttcacaacgattttatctatttttggtacttccattactgaactataattgaattttttcattaagttttcagtaacttcagtgttaaacttttcttttaaacggttcaaagtgggatcctcctttcaacttgttattaattattagatttaatttcttcgccagattttttagcgatacgaacttttttaccatcaacaaatttgtaacctacacgagttggttcgtttgttttagggtccaataattgtacattagaaacatggattgctgcctctgtttctaagattccaccttcaggatttaattgagttggtttttggtgttttttcataatgttaacaccttccacaacgacacggtcttttttaggtagagtagcgattactttaccttctttacctttgtctttacctgcgataactttaacgttgtcaccttttttgatatgcatgtgggcacctccttatttgtattggttgatatttattaaagtacttctggtgctaatgatacgattttcatgaagttaccttcacgtaattcacgagcaacaggtccgaagatacgagtaccacgtgggcctttgtcatcacggatgataacacatgcattttcatcaaatttgatatatgaaccgtcattacgacgaacacctgacttagtacgtacgattacagctttgacaacgtcaccttttttaacaacgccacctggtgttgcatttttaacagtacatacgataacatcgccgatgtttgctgttttacgaccagatccacctaatactttgattgtaagaacttcacgagcaccagagttgtctgctactttcaagcgtgtttcttgttggatcattagttaaacctcccttatctctaaacttgtattaaataattactgactcttcaacaatctctactaaacgaaaacgttttgttgctgataaaggacgagtttcttgaattttaacaatgtctcctaatttagctgaattgttttcatcatgagttttgtattttttagagtattttactcgtttaccgtataatttgtgtgttttgtaagtttcaacaagtactgtaatagtcttgtccattttgtctgaaacaactttacctacataaactttacgatcgtttctttcgctcacttttgtaacctcctcttacttaattattgattagccttactttgttcaatttctctttcacgagcaacagtttttagacgtgcaatcgtttttcttactgtacgaatacgtgcagtttcttctaattgacctgtagctaactgaaagcgtaggttaaaaagctcttcttttgaagatttgatttgttcttcgatttctgaagtggttaagtctctaatttccttagctttcatttgtttcaccacccaattcctcacgttttacaaacttagtttttactggaagtttgtgacttgctaaacgtagtgcttcacgcgcaacttcttcagaaacgccagcaacttcgaataaaattctacctggtttaacaactgcaatccagccttcaaccgcacctttaccagcacccatacgtacttctaaaggttttttagtatatggtgtatgtgggaagattttaatccaaactttcccgccacgtttcatgtaacgtgtcattgctatacgagcagattcgatttgacgagatgtgatccaagacgttgttgtagcttgtaaaccaaactcaccaaatgttacgtagttaccgcctttagaacgaccagttgttttaggacgatgttgacgacgatattttacacgttttggtagtaacattattattttcctcctccactagtgttcttagtaggaagaacttctccacgatagatccatactttaacgcctaatttaccgtaagtagtgtcagcttcagcgtgtgcataatcgatgtcagcacgtaacgtatgaagtggaacagttccttctgaatattgttcagcacgagcgatgtcagctccgcctaaacgaccagatacttgagttttgatacctttagcaccaagtttcatagctctagtgattgcttgtttttgtacacgacggaatgaagcacggttttctaattgacgtgcgatgttttcagctactaaacgagcgtcaagatcaacttttttgatttcaattacgttgatgtgtacttttttatcagttaacgcatttaatttgttgcgtaatttttcgatttctgaaccgcctttaccaattaccataccaggtttaccagtatgaattgcaatgttgatacggtttgcagcacgttcaatctctacgtgagaaactgatgcttcttttaattcattatcaataaatttacggatttttaaatcttcgtgtaaaagtgaagcgaagtctttttcagcataccatttagcttcccaatcacggataataccaacacgaagtccgattggattaattttttgacccacagtattccctccttaaaagttaattaagcttctttagcttcttctttaccgtcacttacgacgattgtaatgtggcttgtacgtttgttaatcgcacttgcacgaccttgcgcacgtggacggaaacgttttaatgttggtccttcgttagcatatgcttctttaactactaattcatctgtgttcatgtcatagttatgttcagcattagctaaagcggacattaatactttttcaattactggtgatgaagctttgtttgttaattttaaaattgcaatagcttcagcagcatttttacctctgattaagtcaagaactagtcttactttacgaggtgcgattcttattgttctagcaaccgcttttgcttccattaggatgtcctcctctacttaatagatattatcttcttgttttcttgtcgtctgcaacgtgtcctttgaatgtacgagtaggagcaaactcacctaatttatgacctaccatatcttcagttacatatacaggtacgtgtttacgtccgtcgtatactgcaaaagtatgtccgatgaaattagggaaaattgtagaacgacgtgaccatgttttgattacttgtttcttttcgcttccttcttgagcttcaacttttttcattaaatgctcatcgacgaaaggtccttttttaatactacgagccatttgggcgcctcccttcttattatgtgcgtgcagctttaagccgcacacccaaataagttgattatattattttttcttacgtccacgaacgataagtttgtctgatgattttttaccacgacgagttttcttaccaagcgtaggtttaccccatggtgacattggagatggtctaccgataggagcacgaccttcaccaccaccgtgtgggtgatcgttagggttcattacagaaccacgaactgttggacggatacctttccatcttgaacgtccggctttaccaacgttaactaattcgtgttgtaggttaccaacttgaccgattgtagcacggcaagtagataagatcatacgaacttcaccagatcttaatctgattaatacgtatttaccttctttaccaagtacttgagcacttgcaccagctgaacgagcgatttgtccacctttaccaggtttaagctcgatgttgtgtactactgtaccaactggaatgttttgtaatggtaatgcgttaccaactttgatgtcagcttcagcaccactttcaacgatttgacctacttctaatcctttaggagcaatgatatatcgtttttcaccgtctgcatatacaactaaagcgatgtttgctgagcggtttggatcatattgaatagaatcaacttttgcattgataccatctttgttacgtttgaaatcgataacacggtattgacgtttgtgtccaccaccatggtgtcttacagtcaatttaccttggttgttacgtcccgcttttttcggtagcggttttaataatgacttttcaggtgtagttttcgtgatttctgcgaaatctaacgaagtcatattacgacgaccatttgttattggcttatactttttaatagccattgtcgcttacctccttaatggtaattggtttattagttaaataagtcgattgatccttctttaagagttacaatcgcttttcttcttttgtttgtatagccttggtaacggcccatacgttttttcttaggtttgtaattcatgatattaacacttgcaacttttacgttgaagatttcttcaactgccattttcacttgtgttttgttaacacgagtatcaacgtcgaaagtgtatttgtcttcagccattgcttcagaagatttctcagtgattacggggcgcttaagaatatctcttgcttccattatccgagcacctcctcaacttttttagcagcagcttcagtaattactaagctgtcagcattagtgatatctaaaacatttaaaccttgagcagttgtcacttgaacgccagggatgttgcgcgctgataattcaacatttacatcttcgttttcagtaactactaatacttttttaggttgttctaatgtagataatacatttttgaattctttagtttttggagcttcgaagttgaatgcgtcaactacagttaagccattctcttgagctttgaaagataatgctgagcgtaaagctaaacgacgcattttcttaggcattttgtatgcataacttcttggagttggtccgaatacgataccaccgccacgccattgtggagcacggattgtaccttgacgagcacgacctgttcctttttgcttccatggtttacgtccgccaccgcttactgctgaacgattcttaacagcatgcgtaccttgacgtaatgaagcacgttgtaaattaatagcttcgaataaaacgctattatttggctcaataccgaatactgcatcgcttaattcgattgaacctgatttagttccgtctaattttaaaacatcataattagccattatgcatttcctcctttcacttcttattatttattaccttttttaattgaagttctgatttctactaaaccttttttaggtccaggtacgttaccttttactaagataactttgttttctgtgtcaacttgaactacttctaagttttgtacagttacagtatttccacccatacgtcctggcattttttggcctttgaatactctagaagcatctgaagccatacctacagaacctggtgctctgtggaaatgagaaccgtgtgacataggtccacgagattgtccgtggcgtttaattgcaccttggaaacctttaccttttgatacgcctgttacgtcaataacgtcgccagctacaaaagtatctactgagacttcttgacctacttcgtaagcatccacgtctacattgcggaattcacgaatgaagcgcttaggtgctgcgtcagcttttttagcgtgaccttcagctggtttattagcatatttattagattttgcatcttttttgtatgcttttttgtcttcaaatccaacttggattgcgttgtatccatcaacttctacagttttcttttgtaatacaacattttctttagcttctactactgttacagggattaattcaccgttttctccgaatacttgtgtcatcccaatttttcttcctaagattcctttggtcatcgaaagtccacctcctaaaattgtctattataatttgatttcgatgtctacaccagatggtaagtttaagcccattaaagcgtcaactgtttttggtgttgggtttacaatatcgattaaacgtttatgtgtacgttgttcgaattgttcgcgtgaatctttatacttatgcacggcacggatgattgtgtatactgatttctcagttggtaacggaattggtccagaaacatctgcaccagaacgtttcgctgtttctacaatcttctctgctgattgatcaatcacgcggtgatcataagcttttaatctgattctgattttttgttttgccataattttccctccttattcgtctacatttagtgatagacttctccacgaaaactatcttacacagcgccatggcaaagcggccgggtgtgtcagtaacctttcgcttcatcgcttttcttaaagtccaacgttagttatattacacgaaaaacatcgataaatcaaggcttttcacataatttttctatctgtctaacacatacttttatattttactttatatacttagtcagttcaactattttcgagatattttttatttcattctttattgtaaattcgtaccttgaatcattttattattatcattgaaaattattctatataattagtcataagaacggtggtgaatgaatatgaaaaatggaccaaaattatctttagctcttataggtatctttttaatactttgtgagtttttctatggtattccttttttaggtgcaacgtttattttaagttttggatggcagcctttactctttaatgcattactttatctaattcttactattatattattagtgaatagacaaaatgcgattagacctatagcgattattccaatatttggtatagtaggtagttttttagctattatccccttcttaggaattttgattcattggattttatttttcctaatgattctatttgtcctagttgtattatcagcgccaacctatatacctaataaaaatgctcgtgtcatttacacacaatacaaagatggacatagagaataattcttaaaacctttttaattaggtatatataatatagaagaaacacgttcaataattttaaaagaagtatatttatatcggatatttaaagacattcataatattgctttatgctatttcgcttcttattttatccttacttcaaagaaaaaaacgactaccaatcattggcagtcgttttttgtgtctggatttaaccatgaacaaatatgaagtacagaatgaatagtaccattaatacatacattatcggatgtacttctttatgttttttagagataagcattgtaattggatagaaaataaatccacacgcaataccagttgcaattgaatatgataaaggcatcataatgattgtaatgaatgctggcactgcaacttcaaaacttttccagtttatctcagcaaagtttgcagccattaatacacctaccaccactaaagctggtgtcgtaactgcacttgttacaacagcgattaacggactaaagaatagcgctaataggaaacaacaacctgttacgatactagcaaatcctgttctagcacctacagcaacacctgaagttgattcgatataagaagttgttgtagttgttccaaaaaccgaccctacaatcgtagctaaagaatctgagaacaatgctctaccagctcttggtaatttattatctttcataatacctgcttgagtagcaacggctactaatgtaccagctgtatcaaagaaatcaataaataagaacgttaaaataacaattaagaactgtatcgttaataattgacttgggtctttaaacgcttcaaatgcagcaccgaacgttggttcaatacttggaatcttacctacaataccagatggcatttgaatcaatccagtgaacataccaacgattgctgtgatgatcataccgataaagatagaacccggcaatttaattgcatataaaataactgtaataacgataccgaatatcgctaaaagtactggtggatcagttaaatgtcccaatgttactaatgtagattcatttttaactataatacccgaactttgtaaacctacaaatgtaatgaataaccctatacctgctgaaacagccatcttcatttgataaggaattgcattaataataacttccctaaaccctgtgacggttaatatcgcaaagaatatacctgagaataaaacacctgttaaaccaacttgccaaggaatacccatggttaacacaacagtaaatgcaaagaatgcatttaatcccatacctggtgctaacgcaattggatatttagctattagccccatgaatagcgagcctacaaatgctgctaatgcagtcgctacaaaaatggcaccttggtccattttcatatcttctgatacgcctttaacacctgctaaacttaaaacttgcgggttaactgctaaaatataggccatagataagaaagttgtgataccgcctaagatttctcttttaaagtttgttccatatttatcgaactggaaatagtttttcacgaatggatgctcctttttttaaaataccttaatagtttaatatcattcttaataaaaaacaataccaaaagcgaacttttcaattttctgattcaactttgttcgattttatctataaattcaagttctttaatgcatctttaaacggattattgtctaaaccttcatttttattcatatactttttcatttctttacgagatactttaccagaggatttagacttcatacgctgatccatatgtgcttgcgtttcagaatgtccacaaacacaacgatataccgcttctttccctttaccaaacaacgttaatttctttttacagtttggacatcttgcatttgttttgcgctgtacattctttttcgtcttacaagatggatcttggcacacaagcatctgaccatttttagttttaactttaatcatgaatttaccacacgttgggcattcagtagttgttaaattatcgtgtttatatttacgatcactatttttaatcccatttacaacatctttcgtaaaatctttcatttcattaatgaatgttttcgcctgatatttaccacgttcaattaaaagtaatttttcttcccattgtgcagttaaaagtggcgacgttaattcttctggtgctaattctaatatttgtttaccttttgacgttactttaattttaccgtctcttgattcaatggcattcatattaaataatttatcgataatgtcggcccttgttgcaactgtgccgataccacctgtttgttttaaagtttgcgcatattttttatccttcaattgaataaagttctgagggttctccatcgcttttaataacgaaccttcattaaaatattctggaggtgttgtttcatgttctctaatgtttgtttttgaaatcttcacttcatcgccttctgaaaaaggctgttgcatctctgtaatagattcaccttgtctaatagatttaaagcctaatacagttgttacattctctttcaaaacaaatgtgtgccctgcaacctctaaagttacagttatcgcgtcatactcgtgcggaggcattaaagcttctaaaaaacgctcgacaatcatatcgtataactttaattctctattacttaagtctgacatgacaggtctcacttctgtaggaataattgcatggtgatcagatactttttgattattaaatatcgacatttttgatgaaaatgttttagacattaatgggcgtgcttggtctttatatgttgttgccatcgtcgcctgaatacgttctttcatagtatctaccatatcagttgttaaatagtttgaatctgttcttggataggttacgactttatgtctctcatataaactttgaagtgtattcaatgtttctttaggtccaattttataacgtctatacatatcttgttgtaaatctgttaaattgtacagtgattgcggatacgacttcttatgtttagtagcaacagatttaatcttaccatcgacatttttcaaattattaactatctgttctaaagtttctttattggtatatcgctgatttgattctagctgaaaatcaaacccttttaccgttaacgataatgtatagtattgttgtggtttgaactgattaatctcttgttgtcgtgtatttactaattgaatcgttggtgtctgaacacgtcccagggatagctgtgcatcatactttgttgttagtgcacgcgttgcattaatcccaacaatccaatccgcctcacttctcgctaacgctgcataatacaaatcgttatattgacgaccgtcttttaaatttttaaaaccttgttgaatagcttttttagtaactgagctaatccataatcgacggagtggctttttgttaccaactttatccaaaatcaatcttgcaactagttcaccttctcgtccagcatctgttgcaataataatatctttcactttattatctaaaattaacgcttttactgttttaaattgtttgcttgttttaccaataacaaccgttttcatatatttaggtataattggaaggtcttctaatcgccattcctttaaatttttatcgtattgttcaggtgtcgcatttgtcactagatgacctaacgcccacgtgacaatatattggttattttcaaagtaaccattacgcttttgatttatttgtaaagcatcagcaatatctcttgcgactgatggtttttcagctaatattaaagatttcataaattatcctttctcatacgttcttttatttcgaacgtgcttcatctattccactaatctttgatttaaattcaatgattgcaaatgatgtgttaaatgtattgtaacatgttaatatcactattaactttcatttcagttgaaatactatataataaaagtaacaaaaagtacggaggtaatgacatgagcatagttcagttatatgatattacacaaataaaatcgttcattgaacattcgaattatgaatcagcatcatacttatataaacttcctcaacagtacaatgaaatagatgtattaataaccgatgcgattgaatcacctggtgtattttcgattaaagaaaacgattcaattaaagcaatcatattgtcttttgcatacgataaaaataaattcaaagtcataggtcctttcgtggctgacaattatgtattatctgtcgaaacgtttgaaacgctgtttaaaacaatgacttcgaatcaacctgacgatgccgtctttaacttttcttttgaagaaggcattcaacaatacaaaccattaatgaaagttattcaagcaagttataacttcactgactattacatagaagcccgtacaagattagaagaagatatgcaccaaccaaatatcattccttatcacaaagggttttatcgtgctttcagcaaattacacacaactacatttaaatatcaggcacagtcaccgcaagatatcattgatagcttagacgaccatcatcatttgtttttatttgttagcgaaggtttacttaaaggttatttataccttgaaattgattcacaacagtctatcgccgagattaaatacttcagctctcatgtagattaccgtttgaaaggtatcgctttcgagttgctagcgtatgcattgaaatatgcttttgataactttgatattagaaaagtttattttaaaattcgtaacaaaaataataaactcatcgaacgatttaatggtctaggtttccatatcaactatgagtacattaaattcaaattcgaatcacgtaacgtaaaagatcaaacaatccctgaataaaataccaagcaaataccccacagtacatcattagcatgtattgtgggtttttatactttttgtaaatattgaaaattgtaagtagttgttttttactattagggcagaatgctttacaataacatgcaagtgtcaattaaggggagcacttgcataaatagtataggagagtgagtagtcttgcaatttcttgatttcttaatcgcacttttacctgctttattctggggaagtgtcgttcttattaatgtgttcgtcggcggtggaccttacaaccaaattcgtggtacgacgctaggcgcactcattgttggattaggtttacttattactggtttcgcaaaattcaataatcctactgtaattattgtcggtcttatttctggtgcattatgggcgtttggacaagcgaatcagcttaaatctattagtttaatcggtgtatcaaatactatgccagtttctacaggtatgcaattagttggtacaacattattcagcgttatctttttaggtgaatggtcttcaatgactcaaattatctttggtttaatcgccatgatattattagttactggtgtagcacttacttcacttaaagctaaaaatgaacgtcaatcagataatcctgaatttaaaaaagcaatgggtattttaattgtatctacagttggatatgtaggtttcgttgtacttggtgacatctttggtgttggtggaactgatgcattgttcttccaatctgtcggtatggcaattggtggctttatcctatccatgaatcataaaacatcacttaaatcaacagcacttaatctattgccaggtgtgatttggggaattggtaacttgttcatgttctattctcaaccaaaagttggtgtagctacaagtttctcattatcacagttacttgttatcgtttcaacattaggcggtattttcattttaggagaaagaaaagatcgtcgtcagatgactggtatttgggcaggtattattattatcgtgatagctgctataattctaggtaatttgaaatagaaagttaaatactcatgtaacgtaaaaatgttatcgcttctgaaaattaccattcacttatagaatgattaaaattaattttcgagaattttacgtttaatgttcctctatatgtcccaggaaatacatggctctaaaaacaaaacgcaataactcatcatgacattaatcatgcgttttaagaatttaaaattagcgatacttttaaaatcttaatgatattcatttatcaagtatgcgccatatacatcaagtggatagctgcatagggagtgggacagaaatgatattttcgcaaaatttatttcgtcgtcccaccccggcaaggttgactagaattgaaaaaagcttgttacaagcgcattttcgttcagtcaactactgccaatataacttcgtagagcatagaatattgatttatgtcccagcctgttgaacaactatgtcataactaaaagcccccttttcacaatatgcatttacatgttgtggtaaagggggctctcattttctacgaatactaaaatcgattttatcttcaaatgtgtaaactagacaaacactgcctgatacacgtacaaaataatgatactaataatgattgttaaattggtcgtcatacctataaatggcagtgttcgatatttaaactgaataccataagaaataattgcgacaccaaccgggaacatccaagtgaccaacaatgtcgtcttaatcatatcatctgataccggtaacaacacatgtactaacaatcccgcaattaatgctaatccataatgcaaacataaatatttaatagtagcaggtatatactttctttccagagtaaaattcaacatgacacctagcaaaatcattgataacggcatatttgcatgggaaagtatgctaaagaaatcgattgccacatgtggtaaatggatgtgacttatattcaatataaacattacaatgtatgtaacgagtggcactgattgtaataatttcttacctaaatatttaaaatcgaattgatcactaccttcactaaagtagctacctacaaagtaagtaattccaaacatcacaaaggcaccacctatatcagccataccaaaataaataagccccgttttaggccatatcacttcaattagtggatatgcaaacaatccaatattcatagcaccagtcatcatacctactgatccacgcatgtgattatcatattttctaaaaaaccagacagcaatcattttcgccacaataccatagataatcattaaaattggtaaaatggagaatgacaattttaattctgcactgtttaaattcacaataactaaagatgggagtgtgacattaagaactaatgtagcaatgacttgactatctgttgcctttatataattaatgcgcttcaaaaagtaaccaagcgcaattaataaaataatcatagtaaattgttctgtcactgttatcccttctttcaattaccttcataatttataactttaacatactccacagatattttagaagtctactgtttcatgctataatctacattaaatgcacttaattatatttcaaaggagtgttatagtatgtctttagaaaaccaactagccgaacttaaatatgattatgttcgtcttcaaggtgacttagaaaaacgggaatctttgaatttagatacttccgcacttgttcgtcaacttaaagatattgaaaatgaaattagaaacgttcgcgctcaaatgcaagattaataatctatcattcaagcaataaatgcttttcattacataaatttgactagcattgctctgaatacgttatattgatgaattgcttcatttttcgctcaattacatctagaatcacaagatgttgtcgtgttatgatttagtgtctcattaacaacatacgcgcatatctatcccaacactgctatttatgttttctacgctgctgtacctacatgaaccctttgaaacggagaggaagttatcatatgcaattttatctgattttactagcaatactttatctaattgttagttttattagtatttttaaaatggaagttgtatttactcgcattttgagaattattatgggtgtgttgttattattcgtcttagcattaacgacgatgagttttccaaaagagaattggtgggtatttatcgtcttattactcttagtcggtaatgtcgaagtgacaggatttaaaatgcttaaaaaagatctaaaaggcgtaaacatcttgaatttaatgtcattatttatctttgtcatatatttcatcttaaccatcgtattattctaagtaataaacaaagcatgcaataacataactgcaaccttatattatcatcagattacatatcgaatgccagtattgatttattaacacatcgattaaatcgcacgtgaaataaggtctaaattttcaaattttaaaaagccataaaagtagtcaatatcatgaccgcttttatggcttttatattatctatcgtttagtgaatcgtttttttaaagtaaagagaatttcatatattactggtacaactacaagtgttaataacgttgatgaaattaaaccaccaataactgtagcagctaatcctttcgaaataagaatcgagctatcttgaccaaataacaaaggaactaatgcaccgattgttgcaatcgccgtcattaatatcggtctaattctagtaccgcctgcttcgattaatgcttctttcatctccatgccctgctgctcattattaatgacacggtctattaacacaatagcatttgttactacgattccaattaacattagcataccaattaaacttggtactgatattgtttctcctgtgattaatagtgcaataattacaccgataactgtaaatggtaaagagaataaaattgtaaatggtgctaggcctcctttaaatgtaataactaggattaaatatacgataatgattgcagctaacattgcaaaggctaattgtgtcattgcattgttaatatcatctgatgcaccaccgatattaacctttacattattcggtttgtccaaattatttattttagacatcacttgtcgtgttgtgccacccacatctttatttgttactttagcagataccgtcgttgcataatcaccttgttcttgcgtcaatttacttggtgtcgttgttttaactaacgtagcaatatctcccaatttaatcgtaccaccagtcggctttttcaaagttatattattcaacttatcttctgaccagtctgtttgcttattttgtttgactttaacatcaacagttttaccattttctttaacagtcgtaactgttttttctggtaagttttcattcaagtgcattgcaagttgacttgcagaaataccattttctgccgctttattttgatcaactttaatttcatactgatcatatgtttgcgataaatcagatttgacattggctagtcctttaacctgtttcattttctgttcaatatcttttacagttgattttatggcatccattgatggaccttttacagtaacctctacagatttattacctgcacctgttcctaaatcttgatttttccactctccaggatgtttaaagccatctgcatgtttaataaccttatccgcttctacatcaaaattaggcgtgtcattatcatattcaaccatgattgccatactatttgtactacccgttggatctactggactactaccgccaactgagtattgaattgtttttacatgctttttctgttttaaatatttttcaacatctttcgcatgattcaacactgcttgctccgtttcaccaggcttcggtgtataagtaatagctaaaaatttatcgtcacctgctgaaataaagctagtgcctagtctcggtcctccaaatacaatagttgcaaccaaaattaatgtacttaatataattacaatccacttatgatttagtgaccaatgcaatacttttttataagttgtactaacaacacctaatccttcttgatgttgtttattacgacgtttaacgccttttttaaatagtgtagctgccaacgctggaacgagtgtaattgacactaataacgacgctaataaactaaatgcaatagccaatgcaaaaggtctaaacatttcgcctactgaacctgatacaaacacaagtggtaaaaagacgataatagtaactagtgtcgatgacattattggtttaaatacttcagttgtcgcactgataattaaattttcaccttttagttgttcttctgaatctgttaagcgtcgataaatattttcaacaactacaatcgaatcgtctatcacacgtccaatcgctactgttaatgcacctaacgttagtatattcaatgaaacatcactcaatttcagagcaataagcgccataagaagtgataacggaatggatataatagaaattgccgtcgtacgaatgtttcttaaaaacagcaaaataactatgattgccacgattgtacctaatgatgctttttcaaccatcgtataaagtgatttctcaactggttttgcagtatccattgtttttgtgacattaaaatctttattttcatcaacgaatgtatcaattttacgttgtacatctttggctacttgaactgtattggcatcttgagctttagttatttgtaaattaaccgcatccttgccattcgttttagaaatagaagtacgcacatcaccaactgtaatatcagctaaatctcctagtttcgctgtcggcataccacttatattatttgatgctgacgcttttgaattttgttgcggtgatgcctgattaacgtctgacatggctgaattttgtttattgtcactttgggattgagattgcccttgtcctcctgccaacgttaatggaatatttatgtttttaaaagcatcaacagattgatattgaccatcaacaacaattgatttatctttatcaccaaattggaacaatccaagtggtgttgttcttgttgctgtttttagatagttttctacatcatcagcagtcaacccatatttttcaagttcattttgcttaaatttaagggtgatttcacggttcgtctgcccatttaattgcgcattttgcacaccatctaccgtttgtaattttggtattaattgttcattcagtactttcgttacttttttcaagtcattctctttatttgaaaatgaatatgctaaaaccggaaaagcgtccatcgaattacgtcttaattctggttgaccaacttcatctttaaatttaattttatcgatttcttttttaagctgttcttctgctttatccatatctgtattattttcatattcaactgttacaattgaagcattttgtatggattgcgttttaacatttttcacatatgccaacgatcttacttgattgtcaattttactacttatttcatcttgggtactttgtggcgttgcacccggcattgttgttgtaactgaaataactggattttgtacatttggtagtaattctaatttcaatttagcactcgcgtatacaccgcccaagacaactaaaacaaccattaaaaagatagcaaacttattccccaaagaaaattgtaatagtttttttatcacagtacttccccctctttcactatattcaaaaatattttactcaaccattctatattgtgtaaaaaaatctgaacgcaaatgacagtcttatgagcgttcagatttcagtcgttaatctattttcgttttaatttacgagatattttaattttagcttttgttaaacgcggtttaacttgctcaattaattggtacaatggctgattcaatacataatcaaattcaccaatcttttcacttaagtatgttccccatacttttttaaatgcccataagccataatgttctgagtctttatctggatcattatctgtaccaccgaaatcgtaagttgttgcaccatgttcacgtgcatacttcatcatcgtatactgcatatgatgatttggtaaaaaatctctaaactcattagaagacgcaccatataagtaatatgattttgagccagcaaacattaatagtgcaccagaaagataaataccttcaggatgttccttttctaaagcttctaggtctcgttttaaatcttcatttttagcaattttattttgcgcatcattaatcatattttgcgcttttttagcttgcttttcagatgtttccatcttctgctgccatttagcaatttcggcatgaagttcattcaattcttgatttactttagctatattttcttttggatccaactttactaaaaatagttcagcatctccatcttcatgcaacgcatcataaatattttcaaagtaactaatatcacgcgttaagaagccatcgcgttccccagtgattttcattaattcagcaaatgtttttaaaccttctctatcagatcgttctactgtcgtacctcgttttaatgccaagcgcacttttgaacgatttcggcgttcaaaactatttaataactcatcatcatttttatcaattggtgtaatcatagtcatacgtggttggatgtagtcttttgataaaccttctttaaatcctttatgtttaaaaccaagcgctttcaaattttgcaaagcatctgtacctttatcaacttcaacatcaggatcgattttaattgcataagctttctcagctttagcaatttcttttgcactgtctaacaatgcatttaacgcctctttattactataatcaacaacaaaaccacgtgaaatataacatagcgtataaggtaatttaggtacttttttaaaaagtaactgcgcaacaccctgaatttcaccgtcacgacctacagcgattcttcgcgcgtaccatccagttaatttctttgtttctgcccatttcgttaattgtaataaatctccatttgggtgagatttaacaaatgcgtcatgttcctgattagtgatatgcatcttttccatgatttatgatatctccttctatttaacaatacctttaattatacagtttgtatcttatagtgtcgattcagagcttgtgtatgatttgaactcttatttttgaaatgtccatgctccaattaatagtttagcaagttcaaatttactcattttaattgtgaatcattttatatctatgcttcctgttaaatttaatgttatcgtacaattaatacttttcaactagttacctatacttcaaaatactttcatcatctaacacgatattcatttctaacatgaaccaatttgacttcaatgaataaatttctcctcaagcaaccacattaatgttcatatacaattacccctgttataatgtcaataatctaacaatgaggtgtttgatatgagaacaattattttaagtctatttataattatgaacatcgttgcaatcattatgacattgagtcaacctctcaccgtgaattactttagtttacgggttatacttatctttttcacatttatattatcaatctttttcattttaattaagtcatcacgattaaataatatattaacgattctttccattgtgcttgccattattcatatgggcattctcgctcatagtacttacgtatatttatactaatggttcaaagcgataaatagcacctctgataaaaattgaatatggtgaagttgcttgtgcgtcttttatgataaccgaatgatattttgaaactttaccatcttcaattctaaaataaatatcatcattttttaaaatcaaatctgtgtaatggtcgttctcttctacaatgtccatatcaaaccatttcaaccaattcgatactgtttgtgatcggtttttacttttcacaataacagtttcaattgaaaattgtttttgaaaatatttttgcaattttttagtacgcatggaatcactttcttcccattgaataaaaaatggtggtttaatttcatcatcatcctgattcattatataaagcaattgccactttaccttaccatctttatgtgtatctctttccatttgaatcggacctactacttcaacctgctcactttgtagtttatttttaactgcctcaatatcatttgtacgcaaacaaatatttttaaagccttgctcatacttctcttgaacaatttgagtagcaaaagcgactccaccttctatcgtttttgccatctttttcaacttttcattattttctacatctagtagctcaatataattttcattgatataacctaatttattgaatgttccatatttatgatgatacccacctgaatgtaattttataacatctcctggaaaactaaaccgatctaactgatctatataatgaatgatgtgatcaaatttcaatatcattagtatccccctatttacatgtaattacgcttattttaacaaagtataaatatttttgctcttaataattatatattgatttctaattgcccccgttttataattactattgttgtaaaaaaggttagctaagctaactattttatcttaggagatgtcactatgctatcacaagaatttttcaatagttttataacaatatatcgcccctatttaaaattagcagagccgattttggaaaaacacaatatatattatggtcaatggttaatcttacgcgatatagctaaatatcaacccactactctcattgaaatttcacatagacgtgcaattgaaaagcctactgcaagaaaaactttaaaagctctaatagaaaatgaccttattacagtagaaaacagtttagaggataaacgacaaaagtttttaactttaacacctaaagggcatgaattatatgagattgtttgtcttgatgtacaaaagctccaacaagcagtagttgccaaaacaaacatttcgcaagatcaaatgcaagaaaccataaatgtgatgaatcaaattcatgaaatattattaaaggaggcacaaaatgactaatcaaggctcattaaataaatcacctattttcaccaaaagttttacaattaactttttagtcaactttatcgtatacctatgcatgtatttgttacttgtagttattgctggctatagtaagcaagctttcgacgcttccgattcattagccggattagttgtaggactatttattgtcgggtctttaattggtcgatttgctacaggtaaacttgtaaatcaaatcggacctaaacgattattatttattggtttaattgctttaattatcacgcaattactttattttattgatgcatctttagcttttttaatctttgtacgtctcataaacggtatcgcaactgcagttgtgacaactgcaacaggtactattgcggcatacgttacccctgttaatagaaaaagtgaaggcatcagtttattttccttaagtttagtattaggtactgcgattggcccatttctaggtatgttacttattacaaaatacgcaattaatttactgtttattatttgtgtcatattaggcatactcggactcattatctcattatttataaaagttgatttcgaagtaacaaataacaaaactgaaactaatgtcattgataaaccaagatttagtattcatcaatttattgcaaaagaggccattcctgttgctgtaattatgcttttaattggcgttacctatgcgtccatcctaacttatttacaagcatttgctttagagcgacacctagtaactgcagcaagctatttctttatttgctatgctatagcctcgctaattacaagacctattgctggtagattgatggatgataaaaatgaaaatattattgtctatccagcatttatcatgcttttcctttcatttgtgtgcttaatttcaagctatcaaagctggttaatattacttgctggtgcttgcctaggtttagggtatggaaatttatcatctgcaatgcaatctattgcgataaaagtctcacccccgattaaatatggtatcgcgacatctactttttacgttggtctagatgcaggtgtcggcttcggtccatcattccttgggttatttactcatatgttttcatatagtgaaatcttcggctttatggccgctttagcaatcattactatgcttgtttacttcttaattcatggacgtcatgtaactagaaatgccatgaactaaatatttatattcaaaaataaaaagcatgccaatctcaattcatcatttgtctgtccccaagacgcaattatgatgtactgattggcatgctttttaagtttttagtttgtaacgcttaacacttctatttctttagtaattttatctaacaatttcttttgagaagtactatagaaatagaatacttgtctttcatccgtttcagaacgcaatttagaaataagctcttttttatagattttacggataatcacatcgattttacttgtatcccatagcatttcaaaatgtaatgtatccctcaattctttaccgctaatcttttcagcttcatacactttaaaaaggactacaaattcttcaattgaaatcttatgtgttgtttttaaccagtgctttaactgacttagctccctttctgcttctataaaacgttgaactttattactcataatatgatgcctcctatgtttcttcttagatgtttgtaattcatattattatacaattacttaaatttattatatatcaaacttagcattttatctattacaaatattaaattgctggctatatcttgtttagatttatatcttttggacaacttgttgtttattcgacaacatttatacctaaaaaagatatattacaactcaatgacatggagtgtgacatcaatgttaaagaaccactaaagatttattatgtagtgattcttaagagtgggatagaaatgatattctcataaaatttatttcgttgttccccaacttacattgtctgtagaatttctttttgaaattctctatgttggggccccgttccccaacctgcacattattgtaagctgtctttctgtcagcttctatgttggggccccgccgatttgtaaaaacattaaaaacgatcatttctattaaatctggcatagatatgaccgtttttactttaataaataatattgtattttagggagtaagacagaaatattaaagaatctctaatgatttaatatgtagtggttcctacacattaaccaccaatataattcatgtttatctttttacgttgacgattggcaactgtttgagcagttctctcatctgaatatcgatcatctcttatttgccataaagctttaaattgttcttttaattcttcgtcggtcacgccagaacgaataaacgctttaacgttaaatccatcgacagttgcaaataaacatccgtaaaacttcccatctgatgacagccttgcgcgtgtacatgtagaacaaaatgattgtgaaacacttgtaatcaaaccaaattgaacaccgttatccttatggcgataatattttgctacttccccaaaatattttggttctacaggatcgatttcaaagtgctgctctatcatagtaagcatttcatctttagttacaactttgctgaaatcccatccattatcattaccaacatccataaattctataaatcgaatctctatatgtttgtctttaaaatattcaagcattggtataatttgatcatcgttaatacctttttgtataacaacatttacttttacattcaaaccaatagacgtcgcgtaatcaatttgttctaaaatcgtagtcgctttaatattacgattattgattgattgaaatagcgtatcatcaatagcatccaaactgacattaattctgcgtagcccagcatcatataacttttgtccatgcttttttaataacaaaccatttgtagtcaaaccaatatcttcaataccatcgatttgatttaatttagctataagtacatctaaatcccgtcgcatcaatggttctccacctgtaatgcgtattttttttacacctaattctgcatataccttagcgattctagccatttcatcaaacgttaacagttcatttttaggtaaaaatacgaaatcatctccaaatacctctttaggcatgcaataatcacacctaaagttacaccgatctgtcacagataaccgtaagtcacggatgggacgtcctagtttatcttttatttgttctaccatttgtggacctcctaacggcttacaatttttgaattaaagcgtccaaatcatgctgataatttatatttttgtaccaatatgatggcgcatctacatccctgacatccaaataatccgttgataattcatgatatacatttttaaaactgtaattatcagaatgtagtgctttagttatagcgcctaatgcattcggactataaaatgcaattgttggaataaaacgtccatcttctttaaaagctgcgacatctaaatgattttcaataagatgagaaactaaaaactgatacaacgtgcttacagctttaccagtaatcattggtgtatcaacagaaacgacaaaaaacaattcttcttcaggatgttgcttcatgattgtataaattcctgctaatggacctttatcattatgattctcatcatctataacaacatttggatatttaaattgcgttgccaattgcgcatttgtactaataataatttcattgaacatatttgttgattctaatgtcttaattactcttctataaaaggtctcaccgttcacttccgcaaaagctttgggcttaccaaatcgtactgaatgaccacctgcaagaattattgctttcatgctcccttaacctccactaaccggtggaattaatgcaacagtatcattaggttgaatgaaatcggatttttgtacaaattcctcatttacagcaacttgaaactttttattattgatttgcggataacgttcaaacaataaatcttcaaattgttgtacagtcaatgcttgttcaagcacaatatcttcctgtgctttttgtaatatatctttaatttctgcgaagtaaagtaccttcatctctcttattcctccctcttcgcttcttcataattccctttttgatgtccttgccattttgaaccatcttcccaaatttcttttttccaaatcggaacaatttcttttatacgctcaattgcatattcatttgctcgataggcatctttacgatgcggtgaagaaactgcaattaatacagcgatatctgaaatttgtaatggccctattctatgaacaatactcgttatcgttccaggccatttttcatttatttcatctccaatttgtgccaatttcttttcagccattggaatatacgcttcatattctaaatattccgttttgacgcctttagtccattcgcgaacatgaccggtaaaaacaactactgcaccttgatattcatttatagtgaattcacgatattgttctgtttgtatcggttctgtcacgatttcaaattgtttcattcatttcaatcctctatgttaattgtgtatcacaatcatttttaattttatttaataaccattgctcaaatgctgtaaaatcttcatgctccctaacattaatgctataacaaacattcgacaactgttgtaatacttgcaactcttcttcatttcgatagactacgactttttcaaaatcagcatttttaaagccttcaactaatacgatattggtgtcaattgtaacagatttttcaataatttgagtaagattttgattatctacacgtgttacagtttgctgatattgaaatccttgtacaatactttgatctgcccccgcttcaaaatgcttcatgtgatcgacgtctgaatcctgtaattgaatatcttccttaccatgcccatgatgtttaatagtagcaactgtataaccatgtgactttaagaaagagacaatatgcctcatcaatgttgtcttaccagactttttgtaacctacaatttgtaaaatcataaaagaagttcctcttcagcagcgtcagattcagtcaatataatatctactgtatgacccgctttaaaaccacgtgaccctcctggtaacatgaccatacagttagcgtgtgcaattgctacaaccgcacctgatttattgaatcctgaaggtactacagtagctccagcacttgttaacgttgctttagcacgtataaatcgtgtgaatgggtttgctttggtaaaatcttccattaatgttgctttaattatttgcgggaagacttctagtgcgccacacatatgtttaacagctggtttcacaaatagttcaaatcctgtaaaacaagctgatggatttccagataatccaaacaaatactttccatctgcaaatgcaaccgttgttacgctaccaggacgcattgctactttattaaataacacttccgcctttacagccttataaatctcaggtaaatagtcaaagtctccaacagaaactccacccgttgtaataacgatatcgtgtttttccatagcttctttaacaacttgtacaccactatctaaatcatcttgttgtgttttgtaaataccaacttcaagacctaatttttctgctaaggcacgaatcattggaccattagagttacgaatttttccatcttctaatacatcattaacatctaataattcgcttcctgttgcaataacagcgacgctcggttgcttaataactttaacctctgcatagccatatgttgcaaggaccgcaatagcccctggattaattacttgtcctttttttagaacaacatcgcctgtctttgtttcttcaccttttaaagatatattttcatttttggaaaatggtttacgaattgtaaatgtatcttctagttcaatcgtttgttcaaacataacaacagcatctgcgccattaggtatttgtgcgccagtcataatacgcaccgcttcgtgatccccaactaatttatcagaaactgaacctgcaccaatatgatcaatcactttaaactcaatgcgattctgaccacttgccccttgtgaatcaacactgcgaattgcaaaaccatcataaggtgatttatcaaaccttggtatatcataagtagctacaatattttctgctaagatatgatttagacttttttcaagtgctaccgtaattgccggcattgaactctgctgattaacgatacgttgaattgcttctttaactgggattgggtttcttttttctactaccattaaaaatcatctccaaaacttttattttttcatgatatactagatgcactaggaggggtaaaatgactgagtttactcatattaatcaacaaggccacgccaaaatggtcgatgtatcagacaaacaaattacaaaaagaactgctgtcgctcattcaagcattactgtgaatgaaactatttataagcagatttctaataacaccaataccaaaggcaatgtattgaacactgctcaaatcgctggtattatggctgccaaaaatacatcaacaattattccgatgtgccatccattaccattgactggcatagatgttcacttcagctgggatgaaacaaatgcacccctttatactttaaacattcaaacaactgtctctacaactggcaaaaccggtgttgaaatggaagctttaaccgctgcatcagcaacggctttaaccatttacgacatgacgaaagcagttgataaaggtatgattattggcgaaacctaccttgaaagcaagtctggcggtaaatctggagattttcaacgccaatcaggtcaataaattattttgtaagctcatgaatcagatgatttaattctggtttaatgagcttttctaatgctaatttaactgcgcctgttgatcctggaatcgaaaatatcaatttattattaactgtacctgctacagcacgagacaataatgcacgcgtgccaacatcttcaacataactcaaatatctaaacaattccccaaagccttctatctctttagttaaaagtggttttactgcttcaatcgtcacatcacgttgtgcaatacccgttccaccagtcgtaatgatgacatcaatatcttcttctaaccacttcttcacctgcgtcgtgatggctactttttcatctttcacaattgtataatgtgcgtcactcacttcaacgtcatctgcttgtaacaattggcgcacgcattgaccacctttatctgtatcaaagtctctcgtatctgataccgttagtacggctgctttaactgtacgattcaatttaacgttttgatgttcgcccataatattacactccttttgtcttatctttttttatccaaacaataaattcattagatgtgtggcatctgatgtgcgtgtcatgccatgtattaaaaaccttccacctttaaaagcaacaatgcggtgtcctttaaattcaaacataaccatatacgaattactgcgataatttagttgatgttgttttaaaaattgaacaagaatgtcgtgtgtaattgatgcattttcatactgtacagtgtctctaccacacaatgttgcataacgttgttcatttttgtttaaatacggataacttggtatatctccacaagttgtacaggctgaacgttgcattttactgaaaccaaatgaataatgactaccttcccaaatatcgccataagttatttttgtgtcaattggttgttccgttaatactttcatcgcatctcttaattgtaaacttgttgccatcgtcacggcaggttgaatgacccctactgtatcacatgttaaatttaatgctggcaattgtggtaccaaacagttaaagcaaggtgttttaccaggtataaatgcagcttctgtatatgtactctgtacaacaccaccataaatccaaggtatacgatgtttatatgcaaaatcattaatcagttgtcgtgtttcaaagttatcggttgcatcaataataacgtcaacgtcctgtccatgtgtttctaaaaaataataatccacatgggcaatataatcatcaatatcaacatcactacgtaacgctagcaaatgctttttagctgcaaccactttaggcatcattttcaaagcatcttcttcagtaaacaatgtttgtctttgtaaattactaaattcaatataatctctatcaacaatgattagtttagcaatacctgctctaacaagtccttcagccacatgtgtacctaatgcgcccataccaataatcaacgcacatttttgatttattttgctttgacctatttcacctatttgtttaaataaaatttgccttgaataacgttcttgactcacattaagttatcctttctttttatcattactttcattatatgacgcgcgtcaatgtctctcaaaaaactgcccctaaaaaagagtttaaaacatcattaaaatgctgatagaagcattcacttctacaattttaaatacgttctaaactctttaatggcaaataaatgattacccaattgtaataatttcatgagccatttgttctgcttcatagtttgaatgtgtcacaaatatgattggtatttgccattcgttgaaaatacgtttaactaatgtaatactctcatcttttgtagtatcatccaaactagaaaaaggttcatctaataaaattaaatctggtttcgtgctaagtgcacgtgcaagtgctacacgttgtgcctctccacctgacaatgtcataggatattgtttcatcaaatgatcaatgtttaaagtttgaattaattgatcgatgtgttcagatggttcagccataaaagtaatatttttatagaccgtcatattaggaaacaattggtagtcttgaaatagatatccaatacgtcgttgttgaattttaacattcacgttttttgccgtatcagttagcaattgcccattcacttcgataatagcttcatctgctttacgtaatccggcaatcatatttaaaacagtagttttaccaatgccagatggaccacgaactgcataaatttttggttcggtatcatttatattgatgcgaattaaagtgttctttaattgatatttcaaattgattttaagcatctagtcgacctccttatatttatctttattcaataaattaattgtagatataaccacaatagagaatgcgactagcactaatacccataaccacgcttcattttctctaccttgttccactaagaagtatatttctaaaggtagtgtattggttttatttggaatatatcctgcaaccattaatgtagcaccaaactcacctaatgcacgagcaaaactcatcattatacctgctaaaatagagcgtttagctaatggtaaaattaatttgaggaaaattttcgtttcacttgctcccatcgttctagctgtattaatcattttcgtgtctatacctctgaagccttgcacagtatgttgatacattagtggaaaactaacaatgacagatgctatcacagcacctgtcaaagtgaacactacaggtaaatgtagtacattcgcaaagaattgaccgattggtcctcttggcgagaagatgattaatagaataaaacctaataccgttggcggcaaaacaataggtaatatcaataaactttccaatactttaacccacgaacccttacgacgatacaaccatttagatataaaaatacctaaaaccgttacaataatcgtactgattacagcaactcgtattgatatccaaaaaggtgttaagtcaggcatggattacaactccttatgctgcaaagtggtattcttttaatatttctttagctttatctgattttaagaattccatccactcttttgctaatttactatctgatgtagcaccagcttcgtatgtgattggcttcttaagttctacttctttaattacttttacagtatcaatttttttattttgtttatataagtcagttttatacacaaaaccttgtttcgcattacccttttcaacataatttaatacttgttttacatctttagcataaacgattttactttcgacttctttaaataagttattgttatctaaatactgtttcgcatattttcctgctggtacagttttcacttcacctaatgctaatttatcattgtcttttaagtcttttactgaagtgtaatttgaatctttatcaccaattaatactagactatttttcgcatatttatatgtatcatgtgctttattcttgtcttttaatgcatctacatctttagtatttgcagacataaatacgtcaacaggtgcgcctgattcaatttgttttcttaatgcccctgatccaccatagttaaatttaatatcagcatttttatgctcttttttaaattctgtagctaatttcttggttacatctgttaaacttgctgccgctgcaacttgaatttcttgtttcttaccattggctgcatcatcttttttactttcattattatcgttagaattagagcaaccagctaatactaaaagcattgcaatcacaacagcaaataaacgtttcattttcattgaatgaacccccatttttaataatatttacattttcattatacacttactattatatttgaaaagaaccgttgcctgtttatatattaattcaaacaattgtcaaatttgcataagattgatatttattaattgatgccctaatatgtacattctcgaattcaatttaaatcaaactgattgctcactattaattttcatcaatcaaatttcaaacttaagcaaatatgttaaaattttaagcaaattgctttaaaataaagttcaagctaattaaaggggttagataatgaacaaagatgtatctttaggtcaaccaattgttagatatgaagatggaaaattattcaatacgacagatcaatatgtgacagaatttccacttacaattatggttaatggtgaagaatttgcgactgttatatgcagtccaacaaatcttgaggagttagtcattggatttctggcttcggaaggtgccattttaaagcgagatgaattaaaatctgtactgattgatgatagtaaagggtttgcccatgttgaacttaataaagatttaggcgatcgcttccaatattccacaaaacgaatgattgcatcttgttgtggaaagagtcgtgagttttattttcaaaatgatgctgctatcgctaaaacatctatgtctaaaatcactttaactccaatacaaattattaacatgatgactcgattacaaagtgcaagtcatatttaccaagaaacaggcggcttacataatgctgctataagcgatggtttgacattttttgtacatcgacaagacattggtagacataacgctctagataaattatatggattttgtattcagcgacatattactgtccgagataaagtattaattttcagtggacgtatttcatcagaaattttaattaaagccgcgaaaattggtgttggcgtcattttatctaaatcggctccgacaacgcttgctgtaaccttagctaatgacctgaatattacggcagttggatttattcgaaatggtggctttaatatatacagtcatccagaacgtatcattgattctgaacaataacatattcattatagtgtgacataatgaacgatattctacatgaatcaacaatataaaagcactatttttataagtataagtagctcaaaacaatttaaaaagcagtaagttgatttctactcgaaaccagcttactgcttttttattctaatacaaacctatcatcaatcgttaatttccaatatcttcttttaatatttgataacaaaatgattggtaaacgtaaccttgctttgcatacatatcttttgctgtgtcttcaccatctgtaactaatatgattggtttgtgattttttgatatggcgtattcacctatcaacgattgaattgtagatccaattccttggtgtcgaaattgttctaatacaccaaatccatctaattcaatgtaattttcactttcaatgacatctacaacaccaataggttcattatttaaataagctactaagcgtttaatcgcatctttttgataatgttcccttaccatttcttcatgtgcatctgcatagtcttttccaaatggcaaactaaattgatatgcaacttttaaataggcatctatatgcgactcgtcaacgatggcaatttcaacgtcagagttacgcggtaaattggcaagcgcatcactttctatggcatacaattccataatacctagttcaaaattcatatctttaaacatagccatccaatgattatcaagttgttcattttccgggaaactaaacgcataatgatttgaaccttgatttgtatgtaattgatgttgacgttctaagtctttcagccatcgctcttcggtaggcgtctttttatatatccatgtgttgcttgtgtatcgttgtggaaaagaaggcgttaaataaatcaactgctcgtcgtcattttcaaatatagtgccgttacaatatatatctgacatacttatattagccattgacacctactcctttcacttttataaatttcaaagcaacttattcaattactttattatcttaaatatgattattttaatcccataatttgacgaaactgcgagtgattaagtaaagctgtaccaatcaaacttgctacaattgcttttaatatatcaccaggtaaataagctaatgaaattgaaatagctttcgtaaatggtatgttaataatcatgcccataatcaatgtaccaataacatctaatgctataacaccaaaaactaaaataccaacgaataaaatccagaaattaatttcattgatgaatctatcacgaatcgcaccaatcatgaatgctacaactggatataatagtaaaaaccctgctgaaggacctgcgaatacaccaatgccaccgcgaccgcctgataacagtggcaagccagcaactactaataataaaaagacgataacacttaatgtgccatatttacgtcctaaaatcacacctgctaagaagataccaatgttttgaagtacaattggtactgaagaaaatggtagtggaattaccggtaccaatcctagaatagcgataatcgctgtcattaaagctgtatatactaactgttttgttgtcattttttacttcctttcgtatttcatgaccattattatagcaccattgtaaactttaagaaacgaaaagtttacaataagttgttctatataaattaaaacattaattattctacacagctgttaatttacttttttagcaagtgcagttatataattaaaaaatgcgttgttatctacatgatttatgacattaattttgcgcccatcattacactcaaatgtcttaccttgacttggtccataacttattacatctactttcttctcaattgaatgaactaagtccttgttaccaatataagcagtcgttaaaacatcccataaaaagtatgtagaatttgttataaagtgtgttaatggtggtaccgctgcataacttactcctaaaaaatcaatgcccgtatattggcgttcattcgcccatctttgtctaacatctaacgttagcggtacttgattcgtactttctaaagcaaccatatcaatctctatatcgctatcaaaaacaattttaactgcttctggatcccaatatgcattccattctgcagaaccatcatgctcaggttcttcaacatttccttttggtaaaaaggtaccacccatccaaactaatttttctatatactgaacgattgatgaatctttttgtagtgcttttgctaaatctgtaagcgggcctgtaaacaataatgttactttttctgattgtctctttaaagtttgaataatgtcttcaaaggcttctttgtcgctcacatttgaagcaacgtgtttgactggctcatttaaaattggcaatgcgtccataaaaaaagcatgcatacgccattcttttggaaatggattttttcctcgttcatatgatggcgcaacttgaatatcttcatttgaaaaacgattaataatttttactgatgcgctcaaagatggctctaaataacaatcagcaccaattgtactgacccctatcaaatgaacgttttccatttgtaataatagaaatagagatactaaatcatctacaccaccatcgtggttaaaataaactttcttagtcactcgaaatcccccttacatttcattttccattaacaatattatgtttttataaaacgttgttatatatctttctacaaaatcataacattctgttgtaatccttttaaacctcttctttaattgatagccattccctgatatggcttccataaagtatgtattaaaataattatgatataacttattaatgaagagatacattgagctattttctcaggtatactactttagctgtaataatactaatctatcattaattaaattgaatgataacaacggcacttattattttaaaaaaaatacaaaactctaactttcttgctataaaaatgagagcctaatacaatatcaaaaaattgatatgtttcagactctcatttcactgacttatatagctgaattattttgcagctttaattaatttttcttttaaatctttacgcatgaaatctaatgtataaggatcgttgtaccagtatgtaccagcatcaactttaacaatatgtccttctttagtagctttcaaattcttccacatgtttgttgattcgtatcctggtgtaggtttaccttcacttgtactcacaatgtaatcaccagcatatttttcaatttcttcttgtttcacttcagcccaacctgcttttgcagttaacttttgttgttctggttgcatttttaaaccaaatgcttgatatagtacttctccaccacgaccccagttatcgccgtaagtgtataattttttatcaaattcatcaaacaatgacactgttgcatcttgtccaattgcttttttaatttctttaccgtctttagcagttgtttcttcccaatctttcttccaagcttttactttatcttctttaccaacaattttccctaacatttcttgttgttctaaatatttatgcttattatagtcaacaactactgttggtgctactttttgatattttttaatgtctttgtcagtagagtatacaataattaaatctggcttttctttagcaactttttctacatcgccatcaccaatttttgtaacacctttaaatttatcttttaatactttgctttgatcgacttgttgatttacagctacaatgtttgcacctaattttttaagtccaccagcatatgttggcgcaactactgcaatgcgtttagggtctttcggaatatctaccgttttgccatcgtccattttataagatttagtttcagctttgttatttttttcaccttggttcccacacgcagctaacactaataacataattattaatggtaataatagttttttcataatttcctcctattgaaaatgattatcaattattccaaaattatacaagattgcatatacatttacaatagctagtgctatttatttttttattttcgcaaaaaatttagcaaaatatcttaacatccctataaatccccacaaaaaagggtaaatccgaacgtcaaatgtcatctctttatgccaatcaacgatcgatttacctttttaaatttaaaatgtatttgtaatactcttagcaatatttgtatatgctgcatcttccataggtggattgtgtaatcctgcacgcatgtcacgatagtaacgttgtaatggtcgattcatttctaagcttttagcaccaactattctcatcgctaaatcaatcacttcaagcccttgattcattaccatcactttactcgcacttgttgaatttcttatctgactgtcatctttatattgttgatagccttttgctgtactccataaaaattgtctcgcacataacaatagcgtttccattttccctaaattttgttgcacagttggcaatgttgcaatcgttctttcaatactattagggctatgttggattgcaaagtctacagcataatttctagcagcttgtgctatacctaaataacagcttggtatatgcaatatccaaccatttggcgctttacttttctctgtttccactaaatgttttaatggtacttttacatcatttaatattaaatcatgactttctgtcgctcgcatacctaatacgtcccaattatctgcaatttcaacaccaggcaaattcctgtccactaagaaaaaaccaacactttctaattcttctatataagcagcaacaataatatgtgttagtgctttactcattgatgtatatgtcttcacaccatttaaaatatacccaccatcaactttaacagcatgtgtacttggtcttccccctcttgttgggctacccatttcagcttcactaactgctctattaactaatgcaccattattaatttcaacagcaaattgctccaacatatcttgagaccataatttctgttcataaatttgtcctacgacactcacatgccaaccaatagataatgctgtggcaccatcaagttcacctaaaaatgattgcaaaataaccatgtcttctatggtcgcaccttcaccaccatatgcttttggtaacgttaattttccataaccttctttaattaaccattcaatatttttatatggaaattggctatgttgatcattatattcagacttagccttaaatgtatctccaattgctttgaatttttcaatccattttctttgaatttccgttgttattaaaaaggaattatccatatcattcatattagtcaccccacacaacacacaatataaattatttattcctagtttaacactcgactttaaaaataaaaaggaacgtgctgtgaacaattaaaagaaagctgataattcgattaagtatacacttaattttctccataaaaatacaccttaaactatacaattcgctgtatggtttaaggtgatattcaaacaatactaggtttgatttaactatcaagcatctactttgtcatgtttaataccagcaaataataaaatccatgtcacaataataaatggcaatgttaatgcaggtaagccaaacggttcaagcaatgttgttgtacctagttgcaccactactgttaataacacacctaaaaaagtcgaaatataagggttaatcgctgttttaaatgtatatcctagtgcgattgccattaatacaaagttatatccgaataatccctgattaatatcatcataattaccacctaatagagctacaatgataaagcttaacaaactagctataacagctaagagtgctgcttttcttgatgctatcaatatgccgattaaaatacatacgccaccaattacactcgcttcgataaatacttgactgaatccctcaaataatgactgaatgaaatgtattcgatcattgttgctaaaattaaccgtttcaatgttttgaggcattaactttaacgatgtatctacaaatttaacctgtcctgaaagtaaaattgtaaaccaagtcacaatgacaaaaggcatcgtcagcatcggaactttatatggtcttaaaacttctctcactgcagcagcaactggtaacgttaataaagttgctatcattgttataacaatatctaatcctgacttatctaaaaatattgttaacgcaatggcagttaacactggattaaatccggctaacccatcattaatctctgcttcactataattaatgtaacgtgcaaatgcataagctatgatactacctagcatagctgctaatccaactgtccagttggccacgaataatccaatcaagataaacaaaccagtccacttattactaattaacactacttgagatatatttttcaaaagcacatctatcattttcaaaatgcccaccctttttcttgaatgtttactcattaatatactaccattttacaaaaagttatattaaaaactctattttccaaatcctaaatatcttttgctatttgttttaatcataatcatatatttttaaatacgaaatagtaaatttattttttactactccgtattaaactttgtatattacttgtttatcacaacaattaggattaatataaattttgtaaattgtatctaatatgaaattgggggttttaatttgcattttacacaacgagagcaagacaaattaatgattgtagtggcggcggaagttgcacgtcgtcgtaaagcacgtggtttgaaactaaatcatcctgaggcattagctttaattagcgatgaattattagaaggtgcacgcgatggtaagaccgttgcagagttaatgagttatggtagacaaattctaaacaaagaagatgtcatggatggtgtcgaacacatgattacagatatcgaaatcgaggctacgttccccgatggtactaagttaatcacagtacatcaccctattgtttaaaggaggcagtcaaatgataccaggagaaattattacaaaaagtacagaggttgaaattaataaccatcatcctgaaacagttatcgaagttgaaaatacaggagatcgaccaattcaagtgggctcacattttcatttttatgaagcaaatgcagcattagatttcgaacgtgaaatggcatatggaaaacatttagatattccagctggagcagctgttcgatttgaacctggggataaaaaagaagttcaattagttgaatatgctggcaaacgtaaaatttttggttttcgtggtatggtcaatggtcctatcgatgagtcacgtgtctatcgcccaactgatgaaaatgatgaatatgcaggtgtattcggagataacggtgatgaaaacgtgaataaaaaaggaggaaaaagatcatgagctttaaaatgacgcaaaatcaatatacgagcttatacggtcctactgttggagattctattcgtttaggtgatacgaatctatttgctcaaatagaaaaagactatgcagtttatggtgaagaagctacctttggtggtggtaaatctattagagacggtatggcgcaaaatcctcgtgtaacacgtgataacgtgaacgttgcagaccttgttatttctaatgccgttattatcgattacgataaagttgttaaagctgatataggcattaaaaatggttatattttcgccataggtaatgccggcaacccagatataatggataatgtcgacattattataggttcaacaacagatatcattgccgctgaaggtaaaatcgtcactgctggtggtattgatactcatgttcattttattaatcccgaacaagcagaggtcgcattagaaagtggtattacgactcatattggtggtggtactggtgcttcagaaggttctaaagcaacaactgtaactccaggtccatggcatattcatagaatgttagaagctgccgaaggtttacctattaatgtcggttttacaggtaaaggacaagcaacaaatccaactgcactcattgaacaaatcaatgccggagcaattggattaaaagtacatgaagactggggtgcaacaccatctgctttgagtcatgcattagatgttgctgatgaatttgatgttcaaattgcattacatgcagatactttaaatgaagcaggatttatggaagacacaatggctgctgttaaagaccgtgtacttcatatgtaccatactgaaggtgctggtggcggtcatgcgcctgatttaattaaatccgctgcattttcaaatattttaccttcatctacaaatccaactttgccttatacacataatactgtagatgaacatttagatatggtaatgattactcatcatttaaatgcggctattcctgaagatatcgcattcgcagattcacgtattcgtaaagaaacgattgcagcagaagatgttctgcaagatatgggtgtattcagtatgattagttccgattcacaggcaatgggccgtgtaggtgaagtaattacacgaacatggcaagtagcacatcgcatgaaagaacaacgtggtcctttagatggtgattttgaacataatgataataatcgcatcaaacgttatatcgctaaatatacaattaacccagcaattacacatggtatttctgaatatgtaggatctatcgagccgggcaaactagctgacattgtcttatgggacccaattttctttggtgttaaacctgaattagttgtaaaaggtggattaattaactctgccgtaaatggcgatgcaaatggttctatacctacatctgaaccgatgaagtaccgtaaaatgtatggtcaatacggcggaaaccttacaagtacgtcaatgacattcgtgtctaaaactgcttatgaaaatggtatcaatcgtgcattaaatttaaaacgcatggtgcgtccagttaaaaatattagacaattatctaaagcagatatgaaaaataacagcgcaacacctaaattagacgttgatccacaaacatatgaagtatatgtagatggagaaaaaattacaagtaatgcagcaactgagttaccattaactcaaagatacttcttattctaggaggaacatagaatgattgttgaagaaatccaaggcaatattgccaatttgtcaaattcagaaaaacaaaagcacgtcgaaaaagtataccttgaaaattcagatctcgttaaacgtattcaaagagtcgttacagaccatggcactgaaataggcattcgtttaaaacaacctattgacttacaatatggagatattttatacgcagatgaccataatatgattattgtggatgttaattcagaagatcttttagtgattcaaccaagaacattgcaagaaatgggagatatagcccatcaattaggaaatcgtcatttgccagcacaatttacagagactgaaatgctagtacaatatgattatttagttgaagatttattaaaaagtttaggcatcccatatgttcgagaagaccgtaaagttaataaggctttcagacatataggacattctcatgattgatcatacacacttaagattatttcagttctgtgattcacagtttccaacaggtgctttcagtcattcatttggtcttgaaacatatattcaacgaaatataattcatgatgatcatacttttattgcttggttaaaaatgtttttacaagagcaacttacctattctgatggtttagccatgcgtttagtttatgatgcattggaaaatgatgatacacaaaaagtattacacatagataagctgatgtttgttcaaaacttacctaaagaaacacgtgttggtgcaaaacaaatggggactcgcatggttaaattggctttagaactttataatagcccatggattgcttggtatcatcaacaaatgcaagataagaaagcaaagttaaatccagctatttgttttactatgctaggccatcatttaggtgtagatattgaaacgattattgattactatttatatcaaaatgtttcaagtttaactcaaaatgctgttcgtgctattccacttggacaaactgctggtcaaaagatagttactcacatgattccttatatagaagaaacaagaaagcagattttcgaattaaaagaagcagattttggcatgacagcgcctggtttagaactaaatcaaatggcgcatgagaacgtcaatgttagaattttcatatcataggaggttataattgtggcaaacccgattaaaattggtattggtggtcctgtaggtgcaggtaaaacacaattaattgaaaaagttgtaaaacgtctttcaaaagaaatgagtatcggcgttattacaaatgatatatatacaaaagaagacgaaaagatattagtaaattcaggagttctacctgaaagtcgtatcattggtgttgaaactggtggatgtcctcatactgcgattcgtgaagatgcatctatgaactttgcagcaatagacgaattattagaacgtcatgacgatatagaactaattttcatagaatctggtggcgataacttagcagcaacatttagtccagaacttgttgacttttcaatttatattatcgatgttgctcaaggtgaaaagattccacgtaaaggtggtcaaggtatgattaagtcagatttctttgtaattaacaaaactgatttagctccctatgttggtgcatcattagaacaaatggctgaagatactaaagtatttcgtggtaaacgtccatttacttttactaatttaaaaaccgacgaaggtttggatgaagttatcgattggattgaacgcgacactttactcaaaggattatcataatggatgaacaacaatggactgggcaacttgatttaacagtgttttttgatggcaatcgatcagtatcaagagatattttctttgaaaaagcacttaaagtgatacgtccagtttatctaaatcaatctaccattcctacattttatatagtgaatgtaggtggtggttatttagatggagatcgttaccgtatgaatgtgaatgtcgaagataacgctaaagtgacattgacatctcaaggtgcaacaaaaatatacaagacaccttccaatcatgttgagcagtatcaaacttttaatttgaaagataacgcatatttagaatatgtcgctgatccaatcatcgcatatgaaaatgctaaattttatcaacacaatacgttcaatctcaataattctagttcattattttatactgatattttaactcctggttattcaaaaactggcgaagccttcaagtatcaatatatgcatttaataaatgaaatttatattgaagatgagttagtcacatatgataatttattattgaatcctaataaacaatcgatcaatgaaataggttatatggaacattactctcattatggctctgcttacttcatacatgaagatgttaaccaaaaactaatcgattcagtttatgaaaccattagttcttatagcaatacattcgattgtcgtgttgctatttctcaattgcctacacatggttttgcagttagaatttttgcttatcgcacacaaattatagagaaaatacttggaaccatccaaagctatatcgcagaaaatatttatgatcgtaaacttgattttctaagaaaatattaaaataaaaagactagtgtaccttgtttcaagcttaataagctgaaataaggtatggctagtctttaactttaattaaagcatcttcaatatttaaattttaagttaattttatgtcccaatgctgaataaataacttcgttttaataaattgttatcgttcaatgttattaaacgcaattaaccttgatttaatttttaatgtattcttctaattctgaaatcagtttttgaatatttgctttttgtgtatctgtaacataaacaataactgttctttcgtcttgtaaacttcttttctttgataacaattttaaatcttttagcttttgtaaagctttagttaaatagtaaggtttgaactctgagcacttagcaatctctttagatgagatttcgttagactcacttcttaaaatatgatttaaaatataaatttcttcatagttcaaattgaacttcttttttgtatctctgaaaaacttcttaacttgaaatgttgcgttgactaaatcattaatgtcattaattttactcattattaaaccactcctctgatgcacatcttgttgtagcaaggttcacatgtaatttattaaatcgaaactctatccaactatgttataaagttcattctaaacaaataagtataaaaattcaatatttttattactagaatatggttaaatacatttatttcttataataatttgatgtttaagatattttgccaaattgaaaattattagtctgaatattttgtatcttaactgatatgtaaacttttaaaattttaatctatatcaacgtgtttgatttgatatttttttatattaatttgatggcttgctcacaaaatttataaaatataaaaaaagaagagctttaaatcataacgcatgccatttatctttaaatgcaatgagttatcattcaaactcttcttatcaacctacatacattgacattatactatcatatgttgttttacatattcaacaaacatttcaacgttatcacttttaatatcatgcattgggacattaccaatattaaatttgaacattatagtttgaccatcataatctatcttctctatttcattataactaatacttctataataaaattggccattcatatctacattcataattaatctttcatttgttgctataaatgccccttcaaattcattctcaccttgaacttgatactcaattattcctagcactgacggaccctttttttcagttggaaataaatcatttggattcacattatctaaaatcataatatccctcccacttaaaactataaactattcttcataggtatatgaaatacaagtgattaactatttattattaagcttaacttgtattcccttttcaagataattataacatgcttgaataagcatagtgactttagaaaacttttctcgcttgattgttacaataacacgcctttcatctaattcacatctctcttttttaactaatcctttcaaaattaaacactttaaaatcggactaaccgcaaatatcgggtgatggaattcaccctgtaattctttaaccgtcaattgacctttatgcagatttaatattcctaaaacgtataactcttctaatgataattgacacatatttaaataacactttagatttcgcaacaattcttgtgacgacaataaatacgatacatagtcacaactaaaatcaaatgtatattgaccaaaataacgttcaatatagtcactaagctcattattcatatattctattttatctatatgcatttttttaatcgaaatagtccatttacgttgatccctttgatctcttcctttcaatagccattgatgattgtttaaataacttaacatttgaagaagtgccatcttagattggatttctttcatttttaataacctatctattgaagcgctattggaatcagaattatcatatttaactaatagatttaatagtttcacttgagtcaaagtgagatgaaatgaatatttcaacatatcattaatgactttcaacattagtatgtgtgcagttaaacgcttaactttaaatttagacatctttaaaacctctcttaaaccatgcctatatctcaagatgatatttcaaatgaacaatactattgcttgagaccattaatgaatgatcattaatatttctttctataaaattagctttccaataactgtgttgttgcataatatcattcacaagtacaccattttcggaagtatgattatctttatctatacttaaaacaatttgtttagttttagcatggctaaattgttgaagacccttacacgataaacgtatagcgtctgaattctcatttaacaatgcggctggcaaacaaatgacacattgtacttcatgtttgaacttcgttacaatcatcgtgtcattttgataaataacaatccctcgtaattgattaagtatatttatgataaaaatgaatattgataatctagtcaaatttatttctttgctcgcttcatttataattgacatgtgcataataagtccttgaaattttgtataatttgtcaaaagttcagtaaccttattaatatcagaaattgtgattttttcttttaagtcattattctcattaatcaaatctacatcacatataattttagaacgtgcaatagatacctgttctatttgtcttagcggtaagataaaatagtctattagatgatcaatttctttatcatagcgcgtattcaactcatttggttccagatgatatattaattcaaatactcctatataattatctattaaacgtttcagtttttgaattgcagtagtatttaagtcgttaattaaaaatgcaatcttacatctattactctcaaaagtcatattaaaaattgtagctactagcttttctatcttgcctctttcagtactcgttaacaattccttatattcatgtttaatacgaaatactacatttacattgtaattcactatcttttgaagtaataaagtgatttgttcaatcgatagctcattgcttgtgtcgattgtaacaattatatgcaagttttcaggattaacacctaatctttgaatgatttgtttaatagtatagtaatccatccaataaaaattacttcctttaatatagatgtttttaggttgatacatttgactcctttttgtaggctcaaaaggtatatcaatctcgcgcatacttgaagaactttgattagtatcatcaaataattcaagtatatttttatcaatttcaactaattgggaatggttaattgaatgagatgttggactatatctttttctaattaatttaggagtgtcaccatacgtttctttaaagaggtgtataaaacgagaataatgattaaaaccatgactacttgcgatttcttcaatgggcttcttagaagttaaaatatcaattaagcaatgctccagtctaatatgatttaaatattgaataaaattactataaggtgtcgctttaaacatgtcacttaaagctttgtttgtgatactaacttgattaatgacatctttcctatttatctttttatggtggttgtttgttaaataatcgtgcacttcttcggctactaaatgacgactaccatcgtatgtatttaatgacattaattcaacacacatgtaattaataatcttatcattagcattataaggctgttgtttaattttgctgtagattaaatacttaatcaagattctaaaagtgctagcaacctcatttgttaatatcttgccacgcatcatatagtttgcattcataaacttcaaaaatgtctttgcacttacttcaacaacacaacatacactatcatcatgaccatcaatctgatacaaatcattcaacataataacggtgacatcatttctttttacatcatattgttgtagattgattgaaactacacctgtaccttgtagccaatatataatttttaagtttgcttccttcacactactcattttcatacttttaaaaatatgtagtgaataattatctgtcatcttacatcctcacatatacaaatatattgatttactcctgtttgtctttctcaaatcaattgtcaacatctaatattcactaccaattatatcgccacatgttttttagcagtaacaaaacataaatcgattatatcaaataatacttttattaaaacatttttttatgctaaattaggatattttatccattaaatatacatttttatccaaataccaaagctttcataatcaaagaaacttgatcgttcgtgtcgaatttttatgcattttctgattaaaagtcctatattatgcacaaaatatacatttagaattttcagtaatattacaaatttgtaacatacttattttcgaaacattcagttttcacaaagaatgccgtagttataagttttgcaaaatgcaaatttctatacttttaaaattctattgtgtcaagatattagcaaaaaattacaaaacgttaacaaagcacacaaggacgctaatttctgttatagtctttcttgtcgtttaattacgagagataacttataacattaattttgtcacacggacattacgaaaatattttagatttaaaatttttaggaggatatttttaaaatgaagaaaatcgctacagctactatcgcaactgcaggattcgctacaatcgcaattgcatcaggaaatcaagctcatgcttctgagcaagataactacggttataatccaaatgacccaacatcatatagctatacttacactattgatgcacaaggtaactaccattacacatggaaaggtaactggcatccaagtcaattaaaccaagataatggctactacagctattactactacaatggctacaataactataactacaacaattacaacaatggttatagctacaataactacagccgttacaacaactactcaaataataatcaatcatataactacaataactacaatagttacaacacaaacagctaccgtactggtggtttaggtgcaagctacagcacttcaagcaacaatgttcaagtaactacaactatggccccatcatcaaatggccgttcaatctcaagtggttatacttcaggacgtaacttatacacttctggtcaatgtacatactacgtatttgatcgtgtaggtggtaaaatcggttcaacttggggcaatgcaagtaactgggctaacgcagctgcaagagctggttacacagtgaacaatacaccaaaagctggtgcaattatgcaaacaactcaaggtgcatacggtcacgttgcatacgttgaaagtgttaacagtaatggttcagtaagagtttcagaaatgaactatggttatggtccaggtgttgtaacttcacgtacaatctcagctagccaagcttcatcatataacttcattcactaatttgtgatgaaagtgaattaagccaacaaggtttcaataaccttgctggcttttttaatttctatgaaaaaatcggattggtaaaaatctcaaaatttcgattttcaccaatccgattcactctgtaataaagaataaacaacatacagccattgacacacccaaatttaggcgcgtcaaatcggctatacattgataaatttttagttaaagtacttacaaatatacttgccttcaaattctcaattaatttagtcattacaaatcatgacataaaacttacattacatatattaacatgttccgctacaaaacatattcagtatatgtatagaggatatttattctaagttaaaaccttttcaaattataaccgctacaattataaatgattaaagtgtttcaacatattatatatattccacgctcacattaagttaaacgtgaattcgatgactttttaatacctatccctgtaaaaccatagataattgctataattgcgcataaataacatggtactgtccatatgaaaaattctccaacagagacatgaagttgattcgtatagtaaatacctgatgttccccatggtattaaaggtaagaccatcgtacttgagtcttcaagtgttcttgataaaacggaacgagagacttggtatttttcgaacaaatctttcattaacacaccgaccataataattacaatcgaagcaacacctgcagcgaatacaagcgcaatacaacaaataacagtaatacatattaaacttcctacagaatggatgcctttagaaatagtagttaataagacttctaaacatcctgctttttctacaatacctgcaaatgcatatccgcaaaatatcgttactaatatttgggtcatactcatcataccaccctgttctaacaagcttttcacactggatgaaatatgagactgatgtatcattgagtcgttaaaaccactaaatgttgctttgaaaccatctgtcattttgaaatgatgattaaaagtccccactataatggcagaaaagcttgatattagcatagctggcactgtagccattttaaatagcaaacaaacaatgatcacaattaagggaatccagacccatatgttaatttgataaatctgtgcaagctctgacaacaaagtttggatctgtttatcatttgaatgccctttaaattgaaatccagcaataaaccatactaataaacctatgattgacgcaggtatcgtcgtccacatcatcgaatgtatatgtttaaatatattaactttagtaacaagcgccgctaaattagttgtatctgataatggtgacattttatcgccaaacacagcccctgctataatagcacctgctgccatccctggaggaatccccaattgattaccaatagaaataagtgcaatccctgcagttgatgcagagccccatgctgtaccagttgctacagatgtaacagcacttataaaaaaggctgatattaaaaaatagcttggattcaataaatctaagccataataaatcaaagctggcactgtgccagaaaacatccaactgcctactataattcctaccgctagtataattaaaattgcaggcattgcagtatttaaacgttctgcaatgcctttttctaaatcttgccatgttaagccgacacgttttgcaatccatgtggcatatgctgaggcaataattaataatacttgaattggaatatcaaaaaacacaaagcctgttacaacaacaataaccattacaatcattgtcgaaattgattctaaaaaggttggttttctagtcatcatctatcgtccccttcgcttattgatgagaaacctcttttcttcaatttattgcttttgcataatgctatatccttttctatcttcaagccatcatttattttaaatatttttctaaatcaagcttatctaaaccaatttcttcaactgttaagccttcctcaaagaagtctctctctaaaatggttgatgcaattacaattactgcatctatatttggtgtcggtacatcaataacacgacctaagcttgaccataatactaaaccatatgcaatatcctcagttaaatatctgctttctacatgatttggtcctgggatttgtgaaaatactgggcttgtattaaacaaacgatttaatggttcatcttctttatcacgttctaaataaccacgttcaatacgtgattctttagctgttgataattcaaaacctaatctacggcctaaatttaaacgttctaattcgattgcatgaagtaatctaactgtatgtttagtaattccttctttatataaagcgaactcaccagcataatcaatgcgaccgacattcaataatgttggtcctggatgcacttcaggattaccattttcaagatttgttttaattaagctttcctcttttactaaatgatcataaatacttgaaactttgtcataacaatcatttagacagcttctatcatatgttgaaaagaagatacgacgtacatttagagataaatcaactgctgcattttcaaaatcgacacgcgtaccatacgtcaacgtattagcttccgctaattgtggttttgtttcaatatgtctatcttctaaaacattcataaaacgaattgaccccattgctgcagccatgttgaagaatatcaactgattatcagttacatgctctgccattacatcagcataatactctatgtatgaagatggaataatcacttgaacaatttcagcatcttttaaaacatattccatatcatcactaatatcagtgaattttacgaaacgttcatcaccttcattattaaaatcaaatccgcccttttcgattgcgttttgaaacttacttatagattgattacgacaatataatttaacatcgtggcctttgctcaccatatctactgctgccgtaactgcgccatttcctgatcctacaattgctattttcataaacaaccctctttctatctttggttaaaattataaacaaattatacgtaagacaatataaaaatgatgcgaattcattacgcatcattataaatgttaagtatatataaccttaaattaacctatttaaacgccgacgtccaccaattatttttatttttaataattgtttaataaacatgtttatttttgattatattttgttatagttaaagataatattacaattttcaaaggagtgtctaatatgacaactgaaatgaacgacgtaacaaatcatcaaccgaatcgcaaatccaatgatgagaacattatggcgatgcttatctatttattaagtttattcacatctattattggtccactgattatatggttattgaaaaaagatgaatcgaaactagttgatcgtgctggaaaaaattatcttaactatacgatttcttatattatttggtctatcgttttagtcgttatcactttaataggcgttttcctaattgctaccgatattagtttcattatcattataggtttcatcattacatttatcggtattttatccatattcgctttctcaatattatcttttgtattcacaattattgcgtgtgtcaaatattataatggtcaagaatatgtaatacctttaacaattcgatttatttaaacatattacaaataaatatttcctattaattatctgttaatctcattgtaactttgactaatttttattacaaaattagtcaaagtttttttattcttttacaaatcaataacattccccacaagaagcattaattttgttaaagtaactattgtcatcaattcgagatgtgagaataaaacagtcgctacgttttatttataaaaaaagatatagaactttggaggactttattcatgaaaaaattagtaacagcaactacgctaacagcaggaatcggtacagcattagtaggtcaagcacatcatgcagatgctgctgaaaattatacaaattacaacaactataactacaacacgactcaaactacaacgactacaacaactacgacaacaacatcatcaattccacattctggtaacttatacactgcaggacaatgtacttggtatgtatatgataaagtaggcggagaaatcggttctacttggggaaatgctaataattgggctgctgctgcacaaggtgctggattcacagtaaaccatacaccttctaaaggcgctatcctacaatcttctgaaggaccatttggtcacgttgcatatgtagaaagtgtaaacagtgatggttcagttacaatttcagaaatgaattatagtggcggacctttctcagtaagttctagaactatttctgcaagtgaagcaggtaactataactacatccatatttaatataaacacgatgatacatattgtcttgaaacttaattctagtacatatgtcatcaaaaactttgagctttcctttataggagaagctctttttttgctatttttcgtagccacctacttatatatattttctcctatattcataatattaatttttttcaatactattaactttaaaactacgttatctaatttaattgatccagtttttccacattacaatattcatagttctacagtgccaagttatatcacctccatcaaaagtacacgcttacatcattgatacacaagacatcatgacatagttgtatactgtctaatcttctactatactaagataaaaggagtgatcttttatggaaaaagtttatgttgctggtgcaataccagaagtaggtttaaaacttttacaagaacattttgaagttgaaatgtatgaaggtaaaggattagtcgataaagacactttaattaaaggtgttaaaaacgcgactgccttaattagtttattatctacaaacgttgataaagatgttatcgatgctggtaaagacttaaaaatcattgccaactatggcgctggttttaataatattgatatcgagtatgcccgagaaaaaagtatagatgttacaaacacacctaaagcatcaacaaacgcgactgctgatttaacaattggattagtacttgcagtagcgcgtcgtattgttgaaggcgaccaattatcacgtacaactggatttgacggatgggcacctttatttttcagaggtagagaagtatctgggaaaacaatcggcattatcggtttaggtgaaattggtagtgcagtagctcgtcgtgcaagagcatttgacatggatgtactatacacaggacctaatcgtaaagaagaaaaagaacgagaaatcggtgcaaaatatgtagatttagatacactattaaagaatgcagattttatcactatcaacgctgcttataatcctaaaatgcatcatttaattgatacagaacaatttaaaatgatgaaatctacggcgtatttaatcaatgcctctcgtggtcctatcgtgcacgaacaagcactagtgcaagcattgaaagataatgaaattgaaggtgctgcacttgatgtatatgaatttgaaccagatattaccgatgacttaaaatcacttaataatgtagtattaacaccgcatattggtaatgctacatttgaagcacgtgacatgatgtctaaaattgttgctaatgctgcaattagtgccgttcaaggtgagaaaccacaatttgtcgttaactaataattgaatttattataatgacattataaaaatcaacaggctgggacataaagttcttaggcaatgtaaaaaagctgtatttctattaattatttgatagaaatcagctttttttaaaatgtatttgataatatacagctcgtcgagctgctattttccttatattaagtgccattaatacaaaacctagctctcgtttaactttatttattcctcgaactgacattcgagtgaaacccaaaatagccttcataaatccaaaaacaggctctacatcaatttttctttgactatagatttttttcgtttctggttcagaaagcttttgattaatttgggctttaaagtattcccaattataattcttcatgattttcttattggatttcgaatttggcttcatgcattgttgcctcaaagaacatgctgaacagtcatcgcattcatatagcttgaagtcacgtttaaaaccatatctatcattacggtatgcatatcttttaaaacctattcttttgttattaggacatataaattcatcattaagttcgtcatatttccaattttgagtgttaaaaaatgtcacttttaaactttctagttttatctttaataaacatgccatacgtaataagtggcgttttattaaaatcatctataatagccatatagttttgctcactaccataacctgcatcagctacaatatactccaggtaaataaccgaaggtattttgaatcattgttaaaaaatggaattaaagttctagtatctgtcgggttttgaaataggtcataggataaaacaaattgagaatttgtcgctatttgtaaattgtatcctggcttaagttggccatttttcatatggtcttccttcattctcataaaaagttgcatcatgatcagtttttagaaaagctatttctatctttaagaatcgatttttgttcttcatatttactttttctttcggaataatcatcaaatttctttttgaacttcttaatctcagttctttttttacgggtctgttttctaatttgagtacaatcttcgttctcaatagaatgatttaaatcttcgatttctttatctaaatgactaccaattaaatctatttcttctattgttaaatcgctatctccatcttcttttatctctggtattattttttcttcaactaagttcacgatataatgcttttgaattttcgttcaatttcgattcgtgatttttgaatacttttcttccacacaaatgtatatctattggcactagcttctacttttgtaccatcaataaaaattgaattatcatcaataagattttgctttaaacattgactatggaactgaataaataaagattcaattaacgcatcagtattaggattcactctaaaacgattaatagttttataagaaggtgtttgatcttgagctaaccacatcattcgaatactgtcatgaagtaatttctctattctacgaccagaaaatacagattgagtatatgcatataagatgatttttaacatcatttttggatgataggatgttgcgccacgatgatgtctgaattcatcgaatttcgctatcaggtatcgtttcaacaatttcattaacatatcgcgaaatatcatttttgaggaattctaacagaagtttctattgggtagtgtaagttgggtcatgttataatttttatacataaggcacctcgttaatttagtttagtggtatttattaaattatacgaaagtgtcttatttttttaaagtatttcaaagtaaaattacatgttaatacgtagtattaatggcgagactcctgagggagcagtgccaagtcgaagaccgaggctgagacggcaccctaggaaagcgaagccattcaatacgaagtattgtataaatagagaacagcagtaagatattttctaattgaaaattatcttactgctgttttttagggatttatgtcccagcctgtgttctgcggctataagccttccttactggccagccctaaaagggtcactgacaagtcagccaactgcactactatttcagcaaccctaaagggttactcttttttctttctttttctatttttctctccagtgaaaggatctaaatattcttccattgagatttggtctgcaacgatatcctcttgtaattgattacgaatataattttcaatcacttttttatttctacctactgtatccacataaaaatcctttacaccaaaactttctatttccatatctatactttaagttagcatgtctatcaaatatcattaaactactttttccttttaaatagccaacaaatgatgataccccaagtttaggtggtatacttactaacatatggatatgatctttacatgcctctgcttcaattatctctacaccttttctttcacataattgacgcaatataatccctatatctttttttatttttccatatatcacttgtcttctgtatttaggtgcaaagacaatatgatacttacaattccattttgtatgtgctaaactgtttgtgtcagatgacattaaatagcatctcctcgtgttgattattttggttggctgaccaatatttattctagcacgtagagatgcattttttgtgacaatggtagaaccttttctgaaccatacgcatagcgtatggttttcttttcataaacaagaacccccgtatgttgagctctcttttcaacatacgggggttttcatattgttgtattatttttctttcgatttatataagaatttagtttgttcagctgctaatgcatttggcatcattttcataatacgatttctaactgcaacaactatacgactacgatattgggcaattttaccgatttttctagaacgcttaattacttttgcagtatgtttgacacgtattttatcataacgctgtaatgctttttcaaagtcgtatgcgttaaaacaatttactaatacgatagcatcttccattgcttgtccagcaccttgccccatattaggcgttgtcgcatgtgctgcatctcctagtaaaatagtacgaccataaacaaaagatttgagtggtttcaaatcataaatattatgcaataagatacctgtttcactttgtttgtctaagatctctctaacttcatttggatagtgattaaagtatgcttgcaaatgaggtttaccaaacgaactatatttatgattgttttccttcgagttaattgtaatgaaccaatatgcttgattatttaataacggaacaatacctactcttccttttcttccccagtattcttttgcacaatccggatgctttaaatcaatatcatcaattaaacctctaaagcatgtatacccttgatataatactttactgtcagcatttacagattgtctcactttagaatgaattccatcagcaccaatacataaatcaaatgcttcactttcttgttccccgaaatgtatggtaactttatctgtctcattatctatatgcgtgacttcatgatttgtaaatattgcatcatcttttacataagatttaataatgtcaattaatgtttggcgtggtaacgtcacattcaatgtattactttttaatttaacagtagttaacggacgatctttgtcatctaacactgtcattgtagataagatttgcccagcatttttaatacctttagctaagtcatgattacctagttttttaagcacattatctccgataccaatcccagcgccaatttctttaactgactcatttttttcaaagactttaatagtatgaccttgttcttgtaataatgcagcagctgttaatccaccgatgcctgcacctataattgctatcttcatattgtcacctctatatttttcattcttttctattttatcacatgcactattgtttaaaaatgactcttggaactaacgtttcatttttaaagacttaagtgtattatctgcaccattgtatattacatgcacatttagacagcaatattcatttacataatgtacatttgcaacaatgatgtgggagcttgggacataaatcaatgtcctagggtctataatattatattggtagtagttgactgaatgaaaatgcgcttgcaacaagcttttttcaactctagtcagggccccaacacagagaatttcgaaaagaaattctacaggcaatgcgagttggggtgtgggccccaacacagagaatttggattcccaatttctacagacaatgcaagttggcggggccccaacatagaagctggcggaaagtcagcttacaataatgtgcaagttggggtgggacaacgataaagaaatactttttctatagaaattagtatttcttatgcatgagttttactcatgtattcctatttttaagtacacattagctgtggctaatgtgtaagaaccactacataataaatcattagtggctctttatcttttctgtcccactcccgcgttttttgttaggttaaaatccatttaactaacacactcagaatgcgctaaaggagctcgaaacaataaattgttccagcccctttaagcaccgatgtcttatttataatatgtttgtctaatatcatctttctttataccaaactgcttataggatttatccattaatttggcaattttatctgcccagcgaatgtcactcgcatattgatgttgcgcaggattttctggattccatcgcatttgatataaattcagttgattgttttcaaaatattcattacgaatgaactttgcaccaccaatgatcgccttatctggtgatgtccattgttccttttcagcataacttttcccactacgaacagcactactatcgaatgctcctataccaaaaaagttgtaatagcgtttttttccatctttaatgccttttgctaattctgatttgccgttacctgtttctactaatgcatggctaacaagataaatgacattaacctcatatttttcttgagcttctagaaaaactttccctcgattttctaaaatccccttaccttttagcaattgattaacttcagattccgacattggcactttttctgtgatatccatatacttcatatcattgtctttatgtgaaatagtcattgctttagcaatttcattattatttgcttcaacaaatttaccatcctcttcttttgtctgtacaatacctttcccttgttgcattgaaacagcctcatcaaaagagtaattcacatcatttttaaacaatttagtttcattcacgatgagtaatacagcaaaaacaactaaaataactatcaatagtagcgttgaaatgcgtaacttgaaattcttcttcatatagacaaaacctcatttttcttacttagacaataaaaaatatgccactacaatcgctaatattacgattaaaaaagaagcgttaacgattactttcatcgttgttctatctctgaacatcatattaaagacaactagactaattgataatgaaacagcaaaaaaagtaatagctaacactaatttcatcataaataaacagactaaacctatgactaataatgtattagaaattacagctgacgtttttaacattctcgaattaatatgcactcaccctttttatttaaataacttacataatcataataatacatgatgtttcatagccctgtcgatggttgattatcaatagcacaatattttctcgactctcaaaaatattgtttaaagtttgatgaagactcggatacaaaaaatatttcaatataacttaaaacagtgctcctacactgatatgcaggaacactgttatattcaaagacaaaaaaatcggaaagatgaaaagtaaaaaacttttgcatcaatccgatttattatagacccatattaatcttctcgagacataccttttagcatattaagcatatatgttaaactacggttcatgtcgtcatcttttaaaacgcctaaaagacttcttacagatgtcttcgcattaggactcgcttgatttgcaacatgtaatcctttattaactttattaagtaagtcacttaaatctgatacattcaattcgcctaataaaaataccattgaagccatattagataatagccctgtataaatatctttgttgagctcaacagcaaatttattaataatcacttgacgtcctctaactgcgccatttaaagcatctaatattttagcatcatctaacactttaataagtttgattgcttttaatatactatctttgtttgcagcaattgcctctgtaacttcatttaaactttctaacttaatttgttcttctgatttttctaagcgtctaattttagaagatattctctcagccattatttatccacctgatttcctgggaaaacataatctggacgttcccattttttctgtacttgaacactgtactgcggatgacgttttttattgacacggaagttattagggttcaacggtgacttaccacgtttcgtaattacttccaaacgacagcttgtacgtttataagatggtgtatccgtgtattgatcaacatcactattagttaataagttaattgcgcctagatctccattttccatcgcatcattatttaatggaatatagatttctttacctttaacacgatctgtcacgtgaacttgtaataccgcttctcctgtttcagatatcaacttaacttctgcaccttcatgaatgcctctatcttcagcaagttctggagaaatttcaacaaatgcacgtggcactttgtatttaatcattggtgtttgataagtcatattaccttcatggaagtgctctaacaatcgaccattgtttacatgaatatcataaacttcatcttgcttaaagtaattatcaaatgataatgggaataattttgctttaccattatcgaaattaaatccttctaaataaagtattggttcatctgtaccatctggatgcacaggccattgtaaactattaaatccttctaaacgttcgtagcttacgccagcatataatggtgttagtctagcaatttcatccataatttcgcttggatgtttgtaattccaatcgaaacctaatttattagcaattgcttggaatattttccagtcaggtttagaatcacctaatggtttcaatgcttggtataaacgttgaatacgtcgctcagtattcgtaaaagtaccatctttttctaatgaaggacttgctggtaagacaacatctgcaaatgtagctgtaaatgttaaaaattcatcttggactaccatgaaatctaatttttcaaaagcagcttgtacaaaattaatatttgaatcaacaataccagtatcttctccatatagatataatgaatgaatttccccatcatggacaccttcaaccatttcatgattatctttaccaactttaggattcaatttaacgccatattctttttcgaatttagcgcgaatatcgtccgcttcaatactttgatagccagtaattttatcaggcatactacccatatcactacaaccttgaacattattatgtccacgtaatggatacgcacctgtaccaggtcgacgataatttccagtaactaataataagtttgaaattgctgtacttgaatcacttccaatgtcttgttgtgtgatacccattgcccaacaaatgacaacggactcagctttggcacattcttcagcgaacttaatcaactctgcttctggaataccagtagcctcttcagcgaatgccattgtaaatatttctaatgacttgtaatattcatcaaaatcttcaacccactcttcgataaaggctttatcgtgtaagtcatgatcaatgatatatttcgtcactgcgcttaaccaagccaaatctgtacctggtttcggttgataaaaacgatctgcgcgttcagccatttcatgttttctaatatcaaacacatgtattttttgaccaaataatttttgagcacgcttcatgcgtgatgcaataaccggatgcgcttcggctgtattcgtaccaatcaatacagacattgctgctttttctaaatcttcaatactacctgagtcaccgccgtgtccaaccgttctaaataagccttttgttgcaggcgcttggcaatatcttgaacagttatcaacgttattagtgccaataacttgtcttgctaatttttgcattaaatacgattcttcatttgtcgctttagaagaagaaatgaatgatagtgcatctgggccatacttttctttaatagatgtaaaattatctgcaatgacatttaatgcttcatcccattctacttcatggaactcaccatttttccttactaatggtttcgttaagcgttgatctgaattaatatgtccccatgaaaatttacctttaacacaagtcgcaattttatttgctggagaatcatgtgatggttgtacttttaaaatttctctatctttagtccaaacttcaaatgaacagcccacaccacaatatgtacacactgttttagttttcttaatacgctctttacgcatttctgcttctgaatctgagattgcaaatagtggaccataaccaggttctgcttttttagttaaatcaatcattgccgctaatgaaccaggttccgtatcagtcatataacccgcattaccttccatgttaacttccatcatcgcattacatggacatacagttgcgcattgaccacaagatacacatgacgattcattaatcggtacatcattatcccaaatgacacgtggatgctcacgatcccaatcaattctaattgtttcatttacttcgatatcttgacacgcttctacacaacggccacataagatacattgatttggatcatagcgataaaatgggccataatctttttcgtatggcttctctttatattcatacgtttgatgctgaagcccccatgcatccatcgtattatgaatttcacaatcaccattattataatcacatactgtacaatacagcatatgcttttctaaaattcgatcaagcgcttctttttgagcatctttcacgtcattattcactgtatttactgtcattggacgatcaatcaccgtactacatgaacgttcaattttaccatcaatctcaacagtacatgtatcacacgtttgtatcggtcccattgattcgttataacaaattgaaggcacaaaagtatcttgcgctttaatgaattcaagtaaatttgtacctggttctacaagataatctttaccatcaagcgtgaccaccaaatgttcttgcatactattcaccccatctatatatttttccgtaaatgacttttaataaattgcctaatttccacctaaaataaagatgccccacacatctttcagatagaatcaatataattgtattactttaagtgtataatgttaagcgtatttttgtattttttatttttgcaatcatttttatttgaaatattttgcgcgaaattaaaccatctttttgtttaattgaaaataattatcattattagttttccaattatctgtttcacgctttttgccatatctttcacaaccttattaatgacaatacttaataatcacctcacctaaaaatcgctataccatttataaatcccctttttctgaaaattaataacccaagtttgataaatatctactgtcatttagaaggtaagatttatctttaaattaaatttgtaatggattaatttataaaaatcaaatcaggcattaaataaaatagcccataaatacaaagtgttatcaccttctatttaggggctattaattctattcgttattctttttacagctcattctatctaattaatttgtgtacaattttgataacttattttcccttattttactactctagattatcttttaataacttagtactttcagcttttgactgttcactaggaatgaagtagtacaatccgtcactttgaatgccgccttgaccactcaattgatgtttattaatcgtgtcattagcatctttataattgcttctaatcgtattcaaatcacctaatgttaaatctgttttaacattattttgaatttcattcattagactattaaaatgtgtaatcgatgatgggcttgcaatcttattagccatcgcttcaagtacaatttgctgacgttgttgtcgaccaaagtcaccaccagcaccttcttctttacgacttctaataaacttcaatgcttgatcaccatttacatgtgtttgctgtccttttgtaaaacgaacaccatcaacagtgaatgtatcattacttactacatcaacaccgccgatgctatctatcatattatgcaaaccatccatatcaattgtcgcataatgatcaattggcacattcattaatttttcaagtgatttaacagccatatttggtccaccatatgcataggcatgtgcaattttttcagtagtaccacggccaacaatttccgctcttgtatcccgcggtatacttactatttcagttttcttcgttttagggttgatagataaaatcataatactatcactacgctctccgccaccctttttcttacgatcagcatctgaatcgacaccaaacaaagcgattgtgaatggatcaccatcgtttaaactcacttttttatctcttaattctgaatgattgcgatctaacggattgtgtatcttattaccagtaataaaaattttagcagctacatacacaacagctacaatcgctaagattactaaaataccgaatacccataaaaatatttttttcggtaggctcattttacttttagacgaacgtttcaatcccaccactcctttactattccttacatactttgtctgttttctctatttattatatagtaaaataatttttttactatacttctgtagacgtataactattttttatcactagagaatatctatctgtatttttgataaccaccatttgcatttaaaattttaagtaccgtttcatgacatgctttattacttataataaaaggtgcaccctttaaatgatcaattgtcttaccatctaaagtcgtcatttttagattcaatagttctgcaaataaaaactgtgcagcaatgtcccaaggtttaggatttgtattaatatgtgccccaaactgaccttttgccactcgcatagaatctaatccgcaagcaccaactaaacgataactaaatgaggcgtcaaataactcttgcaccgtatccagattcattacttgtgcattaaacgatataatagcgtcttccaattttaacgatggtggttcttccatcttaattccattacaaaaagcaccttctcctcgtattgctttataaagctttttatgcggataatcatatacgtacgataacattggtttaccttcataaaaatacgccaatataatacaataatcttcttgctgttttactaaattggcagttccatcaatgggatccataatccataaatgattaatttcattcgtaatcatttcattacttttttcttccgctaatagttggtgttccggaaaatgtgttgctaaaaattgttgaaattgttgttgaatctgtttatctacatttgtaactaaatcaaatcgatgacgcttcgtttctgtagtcatctccataattaattgtggaataacattgtctatttgtttcaaccacgaacatattaacttatctatttgttgtaatgttttatctgtcacttcgtccaccacttctcatatcattatcattttattattaccctatattaaaagaatcaacaatacaactgaagacttcttcattttatgcataaaaaaatcggctagtcacgtgctagccgacaaatagaaaggaaagtaagtaataaatattgaagatgttgtgatgtaacttgaacgattaaaagctatctgttatatagctctacccctttgtttaatcgctccccctgttacaagtaatatcatagcacaatcttttttaaaatgtaagcgttttccacaaaatttttccgatttttttaaaaagatattgaaaatgtcctcattgtcactcttatgttatactttgtgtaatatatcatcttttaggaggtggctgtcatgaataaagctgaaaggcaaaatttaataattactgcaattcaacaaaataaaaaaatgaccgctttagaattagctaaatattgcaacgtatccaaacgcacaattttaagagatattgatgatttagaaaatcaaggtgttaaaatttatgcgcattatgggaaaaatggtggttaccaaatacaacaagcacaatctaaaattgcattaaacttatctgaaacacaattatcggccttatttttagtgcttaatgaaagtcagtcgtactcgacattaccatataaaagcgaaatcaacgcaattataaaacaatgtttaagccttccacaaacacgcttaagaaaattgcttaagcgcatggacttttatattaaatttgatgacacacaacatatgacactcccaatgttgttttccgacattttaatctattgtacagaacgaaatgtgatgttagtagatcatagggttgatgataatattaaagccgaaaacgttatatttattggccttttgtgtaaacatggacattggcatgcagtcatttatgacattgctcaagacaaaactgccgaactcgaaattgaaaatattatagatatttcatattcattcggtaagacgattcaaaccagagacatatccattgataactatcatcaatttttaaaccccatcgattcctaaactatggagtcgacggggttttatctatgcataaatacttattactgatataacgaaagaaacaaaattatttgctatatgtaatgcaattgttgaacctaggtttcttccagattttaaataagtgaaaaccaatatgatggatagtatgagatatggaccaaactcaaacggtgactttgcatcagtcacatgaataaatgcaaataagaacaccgaaacaatactcatagctataaaattaaacttcttacctaattctccaattaaaatatgtctaaatacgatttcttcaactattggacctacaatcacaattaataagaatgctacaggtaataatgcaggcacttcaaacattttatttagcccaagttcattggctgtttcactatattgcaaatgtttaggtagaaactgtgtcatatattcatatgtataaattaagatgagagcaataatatacgttattgacaatctaagccaatattttttgatatacgcaaaaccagctcgaagccttgatggcatcacttttaaatgaaataaataaaatgcgccaatcccaatcgtatatgctaaagcttgtgtgatagtcgctacaaatatcagattactatcgatttcataataaccaaacaaaattggtcctatgtaagctgcaatgtttagtgcaaatattaatacacctataattggaattataagcaaatctctccatgctatatctttaaacgtgtatttctttttttcattttccactgttatatcctttcctgtttaataattgatttttggaggtacttctacatgataaacgaaactaagtatatgagacaacaaattactaatttgattcaaatcattgatacgattaaatataatactttaatgacagattggaacattcaaacgcatatttataaatttaaccaaatagttactaatgaattgaataagttcaaaggctttgaaacatcatatataataaacgaaaatcaagtttcctattatgaaattataacactacttaataaacgtcccctccgacaagtcgactatggtaacaaaattcaatatcttaatttttatcatacagaactatctaacgcattatttacaattaaatttgaacattaacctatttttcataaaatgtcatttaaacaagttatttattaaaattcactttattacataaattatacaattaaaaagtttcttcaaattgtaaagatgcattaatcgagttataatcataatgattaagatggtagatttagtcttatataactacatttactaagatttaaatagatgagtacataatgtataaattgggaatatacagtatgacttacggtaatatatcaatatattgatatattatttgcacatgggagtatgctatttttttatctatacatcttaaaaaaatttacagttttataattcaatatcattaaacaaacaacatattcagcttatttttcattctcttacgttacaagttgtaaataccatcgcgttaaacaacaatagccaacgctaataaaatatattgcgttaaagtggagtgattaatatgtcaaacgtactaacagaaatagatagtcaatatccatatatgactaaaaatgaaaaaaagatagctaaatttatactaaattcacctcaaaaggtgattaaaatgaggtctcaagacttagcaagcttattagatattagtacttcatcagtcattcgattcagcaagaaaattactgatggcggttttcacgacttgaaaataaatatatctaaatatgttcctaaagcatcatcaatttacaatgttgaattaatgaataacgaaagcacagaatctttaagaactaaactccatacacgtactacacgcgcacttaatcatgcaaataacgaattaaatgataaaactattgatcaaatatgtcattgtttaaaacgttctgagacgatttttatatatggttttggcgcatcttttgtagttgctaccgacttataccaaaagttatcaagaataggtcttaatattcaacttgttcaagaaacacatatttttgcaacattattagcaactcacaattcgaacgacagtgttattcttattactaacaatggtacgcaaagtgaaatgcaatcaatggttaaagttattgatgactaccatatacctataattacaattactagtacaagggataatcccgtagcacaggcatcaaatattgttttaacttatgggaaaactgatgaaaatgagatgcatatgggagcaacaacttcattatttgctcaaatgttcactattgatattttatattatcgttatgttgcattaaattatcacgcatcattagatttcataacacaatctaaaatggctttagataactatcgtaaacatttatcaaatattaactttaaacattaacagtcttatataaattttttaatcatgtcatataataatttatgcatcattttcaaagcttacatgtcttttatcttgtataacatacgcatatgaccaatgatttgataaggccattctatttcttatattaaaaacaaacgcagttgattaacggattcattccatatatcaattgcgtttgttatttttataatgctattttttattttaaagcccacagtaaaaactatcgatagtatacccttttaaaggtaaattcttactacaacttcgatttaagctatatttataaaaaatgcgcctactcataacatttctttggctatttaactttaataagctagggccaagtttgtcataaaataagcgcacattataatcatactattttgcttttacattatttttattatatctaataaaataataaatcgttacaatcgttaagaagatgacaccaataagcactgatattctagtttcaacattaaataccataccgaccaatactaatattaagaataatattgttaagtagttacttactgcgccaccaggcattttgaatgggtgaccttccacttcttcagggtgtaattttctaaaacgtaagtgactgaataaaatcataaaccaaggaatcatacctggtaaaatagacgcactatatacgtatacgaaaatactcttcgctccatcgatatataaaggtaaaattacatttaataaagcaccaattaaaataccaagagatactgcaacaacagtgtacaatggcacaccatttctcatgattttagtaaatattttcggcatttcacctttatgagcaagtgtataaatcatacgactcgcactgaaaatacctgagttacatcctgacattgctgcagttaatacaacaaagttaattaatccagctgcaaatgtaataccgattttagcaaatgttgcaacaaacggacttccaatgtctcctaattgattccaaggatacactgaaacaataacaaaaatagcacctaaatagaaaattaaaattctccagataacaccattcactgctttaacgatatttttctgaggatctttagtttcacctgcagtaatacctatcagttccacaccttggtatgaaccaattacaattgataatgcaaagaagaaaccaacaataccatttggcataaatccgccatttgtccatagattagaaatacctaccgcatggccaccatttccaaaaccaaagaaaataagaccaaaaccagcaataatcattaaaataattgttacaactttaattaaagcaaaccaaaattcaaattctccaaacgcttttaccgagaataaattcgctgccattaataataaaatagcaataataccaggaatccaagttggcaattccgggaaccaaaacttcatatattctcctactgctatgacctcactcataccaacaacaatccattggaatatattactccatgctgtcatataacctgctgcaggatgtatataatcacttgcaaatgttgcaaatgatcctgttgtagggtttaaataaatcatttcccccattgctctcatgattaaaaataaaaagatacccgcaattaaatatgcaaggataactgatgggcctgtccatttaattgtacttgtcgcacccatgaaaagccccacgccaatcgtaccaccaagtgcaatcatttgaatttgacgggcactcaatcccctttgtagttcattgttctccataacttcttaccccatctctgattgatactaaataaatccataaaaaaacttattgccgtaattatactataaattatcgattttggtacattaatatttgcataccatgcaatcgtttacagaactactatagcaggcttttgcaactttgcaaacaattattttgtgatttttctaaaaaattaaaaaagtcgtccacgaaacattgagtcacatacaacttcagctattacaagtaattatgatataattttaataatattaaaaaggagtatatcaatgttaaaacaaatactgccacgtgctacaaaaatatcggtaatctttgctgtagcatttttcatcataaattatatcggtatggaaaaacctgacatcctatatttagttggaagaactattattgcaacacttgctttcatactcatttgtcttacagtatttactattattaattctccagagcgcaagattaaactcggtacgactttaccgattgcattaattattggtatcattttcggcgccatatttttaacggtacaaatcggtgtcatcactgggttaatcatcggtgtgattgctacgtttatttgggaattgattgaaaaaaataaaggaggtcgttcatcatgacaacagcattaattggtgtaattgtattaatcttactaattattagctttgtgccaaactaccgtgctatgaaatcagcaaaagaacaaggaagtaatgcaacaagagctacaattatggtaggcatagatattatcttaattgtacttatcatcgtgacgttattattaaaatatatgtaactatttaaaccaccctatctcatacataaacatgaacgttctaccatttcacatacatatggtcgtccatttaatgaggtaaggtggttttctcgttaaagtttaccttgtaatagtaaaaaatagccaattgttgcgagtattaagtaaatcattgaaccaacaacaaaagatcttacttgcacgcgaaatggtgtctgtttgttaaatataggaccaatcaccaaatttccaacgcctaaaattactggaccagctagaaaaaacaatataatgtaacccatcatgatacgcctcctatttcgtaaagaaacgcgctacaatttgatcgtaatcaatatcttttgctacataatctacattagaaaagtcctgtgcgcttgtcattttattcgtattaacaataacatctaatccagctgcaatcgcggctgtagcaccatttacagaatcttcaatagccaaacattgtgtcggcatataatttaattgttgtactgcagataaatataattcagggtcaggtttaacttgtttaacatcttctctaccaacaactacctctatataatcgtctagacctaatgctttaaaggtaggcattatttccgctttcacactacttgtggcaatcgccataggaatgtgacgttgctttaaaaatgccatcaatgatttaatcgtatcaatcatcggtaatgttgtactagtaagatgatgttcttcataaagtttatctttattttccgaaccaatcgctttaattaaatggtcatgcaaatctgtagctgctcctccaatagaagaacgataaaaatcaatgcttataggatcggcattatgcatctctaaatgtttattaataacattaaataaatgttgttccgtatctattattgttccatcgaaatcaaatataactgctctatacatatatttactcctctattttttctctttatcaaagcttaacacagtccgatgaccacttcattctattagtgcaattataacttttttgaccaatactttgctaaaataggccctgttatattatgaatgaaactaaacactgcgcctggtactgctgcaattggattaaaatgcaatgctgctaatgacacagctaaaccagagttctgcattccaacttcaatactgactgctttttgatcttgtcgatctaattttaaaagacgagctaaccaatatccaatcgtataccctaatacgttatgtaaaataactactaaaaatattaataatcctgtagttaagatttggtgcttactgccacctacaactattgctaaaattaatgaaatagcaacaactgatataatcggcaaagctgtagaagctttttcagcaattttacgattaataatttgcaaaacaatacctaaagcaattggaattaatacaacttgaacaactgaccacaacatactcaagaaagatacttccaaccattcatttgcaaatagatatattaacgcaggtgtaacgaatggcgctagcaacgtagagaccgtcgtaatagaaacagaaagtgctacgttagctttggctaaataactcattacattacttgatgtcccaccaggacaacatccaactaatattacgccaacagcaatatcaggtggtaaatgaaaagactttgcaattataaatgctaatgtgggcataatactgaattgtagacagacaccaataattactgctctaggtgctttaaagaccattttgaaatcattaggtgtaattgttaatcccatacctaacataacaataccaagtaaataaggtacccacttacctaatgttgcaacatgttgtgggaaaataaatccaataacagctgctactaacatccataccaaaaaactcttcgtggcaaatttactcaatttttgaaacattgttaacacatcctcgtcgataatattgaaaaatattaccataagaccagtaaggttacaattacttttctgaaaattaagattatttagccattctcttcttattgcaaatattttatcactgataaacaattattttaaacttcattcaaaagtcttagtgaataaagaaaaaaagcgtggtaaaatcaacttgaacaaaattaagtcacctttataaatattaaacgtgtatttaatgccatgtattcctcgggaggtcctcacatgttaattgataaattcgaaacatacatcatcaacatcgccggtttaaatgaccgtactactagaaaaaaattaagtaagttatgcaaaagtgtacaattttgtgatgcgttgcaattctcaataaacaaacagtttaatcagtatgtattagaaattagcttaccaaagcaacaacttccatacttcatttcatttttaagttttcatcagtatagtattttccaagtactttcaccaaagaaaataaatgaattacttgattctgataatttatatcaatctgcaaagcgtttcgatatcaatattgatggcttgcaagatgctttcattaaagacaaagtcatcgatattatgaatatgttccaaaatcacactgatatcacttatacgttgaataagtctcatgcgcatattatatgtacgccagaaatattcgctaaattgttacatacgattgcaactagaaatatcgacattctatctgccaattatagatcgtcatctatgagcaaagctcgtatatcataataaaagacacatctatacgatgatcatttacaatgattgcgtatagtgatgtgtctttttttgtattatttatcttcggacgattgatcctcaaccatttgttcaaatgcttcacgaacttgtggtactgtcatacctactacaacttggatactcttaccactctttactaatccgtgtgccatttgttgatgcgtgaaatattccgtatccgcaactttactttcatcataaacagttaagcgtaatcttgttgtacagttagtaacatctttgatattttctttgccgcctaaaccgtctaggtaatacgcagctttgtcttcgtattcattaccagttgaagcacgtttagaatctacgctatcaccttttttatttttatagtcttgtttagagaataacttaacctcttcttctgttttcttacgtccaggtaatggaatatcaaatttcaaaattaaaaatctgaataagaagaagtaaatcgctacaaatattaagcctataacaacttgtgccacataagtgccccaatgttctttcccaagtggtaaccagtttgttgaaataaagtctaacaaaccaccacccatatttcctacaacaccaaatgcgtacattaaagtatccattgatgctgctaaaactgcatgtaatacaaataagtatggcgcgatgaataagaatgtaaattctaatggctcagtaatacctacaacgactgctgttaatgtggcaggaataagtagtgccgccacctttttacgattttctttaggtgtcgtagcatacattgctaaggcaatacctaaacatccaaatactttcccatttccttgtaacataaagccataagggaattgctcttttaatggcttagtactcttagcaaactcatttaaatgttgtaaccattcagctttcaagccgtgattgactactactggtccaacttcaattggtgcataaataaagtgatgtaatcctgtcggtattaatacacgttctaagaagtgatacaaccatacaccgatatagcctgaagcaatgataaagtgttgcattgagccaataccgtgctgaacagttggccaaataacacaagtaattgctgctaatggtaacatcacaaaaaatgagattgtaaccacaaatgttaaaccttggaatacaccaaccatttctggtaatcgtttactatagtatctattgtgaatccaagtaataatagctgaaataataataccacctagaatattcgtatctaatgtggcaatacctgcaattgattttaaaccaggtacattttcaacgcctttttctaaattagcgccaaacgtatgtggccattgcgttaaaatggcatttataaatgtattaaacattaagtaacccatcaatgctgcaagtgctgcatgacctggtgcttttttagctaaagaaagtggtaaacctacaacaaatacaacttccatatgcgtaaaaataacccagccaccagattctattactgaccaaaatttaaaccaaaacgtatgttgatctgctaaactccccatgattgtaggatttttaaataatgtcgcaaagccaagcactatcccaaagaaagcgaacattaatactggtacaatcattgcactaccgaaacgctttatcgcattcatcttctattccctccatatcatctttcctaacaatacatctaattagattcatttataaatagatgtcttactatttaaatataatatatagtaaacgcttacacacctacaacgacattgacgtattttgaaagtattttgtataatcagattatcttttcatatagtgaaaattttttcacgaccttatatatgacatcgttgtatttgtaatacattcgttttaaacgcataatcaaacctatatcaatacacaaatatatataatgacatacaagattttaatgtaataacgatctatcacacatttattttcaaggaggttgaatatgtttttagatgaacacattaatcgaaactttgataaacttaatgacaatgatttacatatcgctcactttatcaatacacatatagatgaatgtaaaaatatgaaaatacaagatttagcgcaattcacacatgcctcgaatgcaaccattcacagatttacacgcaaattaggttttgacggttatagtgattttaaatcgtaccttaaatttgaaagtaataagacacaccaattaccatctaactctatcgatagtttcaaacaagaaatcgatagtacattcagttatttagaacgcgttgattaccagcttcttactgaaaaaatgcatacagcttcaacaatatatttgtatggtacagggcgtgcacagttaaacgttgcttcagaggcacagcgtatattgttaacgttacataatcatgtcattgtacttcatgatgaacatgaacttaaaatgattttgaacaagagtgaacctaatgatttattctttattatttcattatcaggtgaaacacatgaattattagaagtaacaaacttgcttcaacttagacaaaaatactttatttctgttactacaatgaaagataatacccttgctcaaaaagcaaattacaatgtctatgtatccagtaacacattctacttaactgatggtacagactattctagcttcatcagttatcatatattctttgaaacacttgtaagaaaatataatgagtatttactacataatgatatttcaaattagaaaaaaggaagttatgatttaatggccttgagcctatcataacttccttttatcattttactgttgtgttgatgtttcgataacgtggtacatcttatcaaacatcaattcgaaaccatgcaccatggcatcatgatattcttttttcttttgtttgtattctaaattagtaaatcgtctttctttttcaactaatgaacgataataaaatagcatttgggtgccacctgtttcacgttcaaaaaattctacctcaatgacatcttgtgtttcacttagtccaggcataccgatagtcatcttaacgtattcatccataactaaagattcataaataccttcaatcacatttactttgccattacgttgttgatctacaatacgatatttaccgccttctttaacatccgcttcaatctctttattcgttctggctgatgtcataaaccattgtttcaacaaatctttctttgtccaagcttcgtatactaactctggagaaaatttataaagcttttcaatttcaacttcgacatgttcattctctacattaaattttgccactgttgtccacccactttcgctcttacttttattttaacgtatttttgctcagttccaaacatagatgatcatcatttttaaaagattagcgttatacggtgagtacaacatgatctgttaatataacaagccaccttacttggctacatcgatatattgttaagcattaatgtttcatttcttgactagtgttctttttttagctttggaaaattaaataaaatcgcaataagtccgcatacacctaataatataggataaatgctatatgggaataacattaatggtgaaataccagctacaccagccgctgaaatgacttgcgggctatatggtaataaaccttggaagcagcctccaaatatatcaagaatacttgctgatttccttgaatctacatcatattcatctgcaatatttttagctaaaggacctgacataataatagagatggtgttgtttgccgtggcaatatctgcgacacttaccaaactcgcaattcctaattctgcgccacgctttgatttcactttagagcgaacaaattgcaacaaccattcaataccaccattgtgttgaataataccgactaaaccaccaattagcaacgcaatcatagcaatatcttccatgcttataatacctttggacactgcatctagtagccccatccaaccgaatgaaccatctatgagaccaatgattccggctaataatgttccgccaatcaatacgataatgacatttacacctaataatgccaatactaatactaaaatatacggtacaactttaattagattataatcatagtttttagcatgatttaaagaaatgccattcgttaagaaatacagaataataatcgttaaaatagcacctggcaatacaattttaaagtttactctgaatttatctttcattttcgtatgttgtgttctaaccgcagcaattgttgtatctgaaatcattgatagattatcgccgaacattgcacctccaacaactgtagccattgctagtgcagttggtacatctgtcgcttgtgcaaatccgtaaccaacaggtgctattgcagcaacagtccctactgacgttcccatagatatagaaacaaacatacagatcacaaacaatcctacaataattaaattttcagggattaatgataggcctaaattaactgtcgactttacgccacccattttttcagctgtatttgaaaatgcacctgctaaaataaaaatcaacatcattaaaataatgtttgaatggcctgcacctttcgtgaagacctcaacttttttagcaaatgattcttttcgattcattaataacgccacaattaccgttatcgtaattgcaacatttaatggcattgaagtaaaatcacctgtgataatacctacgcctaaaaacaacgccacaaataataacaaggggaataatgcccaagcattgctctttttatgtacttccatcctttttacctgctttccaattaaaaatacctctttctcacaaacgatgaagaaagaggtttccatgtgctttacctgcttatcttcaaaccattacggttactggaattggcacattcgagatgttgccgaggcttcatagggccagtccctccacctctctagataagtgatgcttatttacgtttacgttacaagataatccttagtacgtcaatcataaattaatcaggagtcgtataatatttttcataaacaatcattgctactgtaataataatcaaaacaataatgctaataacaagtaaaagccaccatttaagcattaatgcaataaaaatgaacacgatagacacacttactaatattaatgatatgactttaaattgctgtgcgctttgttcagaaataacttttagctgtttgtttgatggacgcgtatttcttatactgattcccagtatattttctaatatttgaaccaatacgatacttattgcaaatataataattggtaaaacatcataggtccctatagttaatgtataaattacaaatccaatgtaaagtaaccctgagacaaaggctaaaaagtatgcgacgtatttgttaaacttaatgatattctttttaacgttttgatgtgtaagccatacattcgaaacaatcgcaaccactacaaacagtgtgaataatatatataatggcaacttttgttcaggaaaaacagtcactattccaaaagctaatgctaaaatcaaaattaagatagctctagatactattaatgccataataacaacccctttgtttaatatcgagtttgcaaatttacgtttatcagcatttctatgatcagtacttctacgggcagcatttctatgtaatttacatcatcttaacatataaatacttcgctatataattgaaaacatatcctattattctttgtccattctgacgtctaatatctaaccttaggcatttcacttgttaatgaatttaactttcttccactaaccgtccctaaacccaatcccgcaacagtttttaactttttcgttgttgtcctgacatcttcattaagaaagtttattctgcttaaaacttataatccacaccctgagcaaacgctccttatgacaaagtattaaaataagccgataaagatacacacctttaccgactatttaaaatacacttcactaattcattttaatttacttgattgaagtagctaaattaatattatgttgttcaattaaaagcttcatacaaacctaatctatttgcactccaccgctaacaccgaacacttgtccagttgtataacttgattcttctgacgctaatagcacataagttccacataactcaacaggttgacctgcacgacctaaaggtgttttttgaccaaatgttgggattttactttgaggttgtccaccagaaatttgtaatggtgaccagaatggaccaggcgctacacagttcactctaattccttttggtcctaattcttctgaaaaacttttagttaatgaaataattgctgcttttgaagcggcataatcatgaagaataggactaggattataaccttgtacagatgatgtcgtcgtaattgacgcacccggttttaaatattccaaagctttttgaactgtccaaaatagcggatagacattcgtttcaaatgtttctgtaaatgcctcagttgtaaatccatgaatatcatcatgatactgttgatgtccagcaactaaagtaacattatctaagccacctaattgttgatatgcttgttcaacaaggtcatagttgaactgctcatctcttatatcaccaggaattaacactgccttttgaccactttcttcaatcacttggcgtacttcttgtgcatcttgttcttcactcggaagatagttaatcgctacatctgcaccttctttagcatacgcaatcgctgctgcacgccctattgctgagtcaccacctgtaactaacattttatagccttgtaagcgttgatgaccttggtaagacgtttcgccacaatcaggtgctggcgtcatttcagattgtaaacccggtacctcttgttcttgtttttcataatccgttgttttaaattttgttctaggatcttgagctgccattttttaacatctccttattcgcttaatggttattatttacccaatcttcctaggaacttaatcatgattacactaaaaattactttcttctttataaaaacaagctcgaattactcatgcaatagtctctttacaaattcaacaaaatactcaggtactttttccagaatcctttcatctggtttatattgaggatgatgtaaatcatattcactatgagaaccaattaacgcaaatacactaggaaaatgttgactataacctgaaaaatcttctccaatcgtaagcggcttttccatcatttccaccttatatccaacatgttgggctactgctattgctttatgcgtcaatacctcatcattcatcacagcgccaggtaaatgtgtataatttaaattaattttcatattatatgcttgagctaacccgtccgcaacatcttgtaatcgtctttctataagctttcgcaccacagggtcaaaactccgcactgtgccttgtacatacgcatgatcagcaatgacattccaagtattaccacatgatatttgcccaattgttactaccgcttcatcaaatgcagatagatttctactaactatggattgaatactattaatcaattgcgccaacacaataactggatcgttgcattgttctggctttgcagcatgaccacccacgcctttaatatgaaactcaaaacgatctactgctgatgtaattgcccctgttttgattgcaaatgtacctaccggacgcgatgggtcattatgaaaacccaatactgcttgtacatcttttaatgcatgtgtttcaataattttaaaagcgccatgtcctagttcttctgctggttgaaaaatgaatttaacacgcccagtaagagtgccctcaatttcttttaactttacagctgtagccaaaatactagccatgtgaatatcatgaccacacgcatgcataacaccttcattttcagatttaaaatcctgttcaacaagctcttgaatcggtaaagcatcaatgtcagcccgaacagctatacaactcagaccttgccccacttcagcaaccagcccagtcttgagcggtaagtctaatattctaatatgatgttctgttaaaatatctttaattttttgtgtagtcttaaattctttatcggatagttctggaaattgatgaaaataccttctccaggcaacagcttgatcttttaattccatcggtcattccccttccttaagtcaataatatgttgtctaccctacgatgatcgtctttgactattaaacgatgatttcacaacaatgtactcttgttaattactttcgctaatgatagacaattgtttaataatatcgtaacactattgtcaaactattctaacttttataactaagaatctatacaaaaacatgttctcggataaacttgtttttacaaatcacaaaaaagctctaaacattagtgtaaatcaatgcttagagctttctaattattttatgctttaaaagataatgtgttatctacgatgaccttaccgtctttaataactttttctgcgtgattgataccaaaatgatatggaatatattcatgatttggtgcatcccaaattactaaattagccttatcacctgtgttaattgtacccgcgttaatgtctattgctttagcagcattgaccgtaacagcattccaaacttcattaggtgatagctttaatttcaaggctgcaatcgccataacaagttgtaagttgtttgtgacactactaccagggttataatcagttgctaatgcaatcgcaccgttattgtctagcatgcctcttgcatctgcataatcttctttacctaaatagaacgtcgttgcaggtaagaggacagctacagtatcactatttcgcaacttttcttttcctttatcactagaagctactaagtggtctgctgatattgcttgttcatcaattgctaattccagtccgcctaacggatcaatttcatccgcatgtattttcactttaaaacctgcttctttggctttttgcatataatgttgcgattgttctattgtaaatacacctgtttcacagaaaatatccgcaaaatctgcatattgttttacttccggaagtaacgcaatcatttcttctaaaaatgcctcatttgaacttgcctctttaggtacagcatgagggcctaggaaagtatgtttcatgtctaaatcatatttctcagctaaacgattagacactttcaattgcttcagttcattttctctatctaatccataaccactcttactttcaactgcaagcacgccgtgtttaatcatagtaagcaaatcatgctctgcttttttaaacaagtcatcttcggatgtttctctagtagcattaacggtagataatatgccaccacccatttctaatatttcaaggtaagacttaccttgacgttttaatgacatctcatgttctcgagatccaccaaatgttaaatgggtatgagcatctactaatgccggagaaactacttttccactagcatcaatcgtctcagtcgcatcgtagtcatctgtatgttgtccagcatatacaattttgccatctttaatgacaactgtaccatttttcacaacatttaattcatctaattccttacccttcaaaggtttatctgttgatctcggtaaaattaattctgctatatgattaattattaaatcattcattacttatcacctgctttatcaatcattggaatatgaatacctttttctttagctgtttgaatagcgatgtcatagccagcatcaacatgtcgggcaacacccatacctggatcagtagtcaatacgcgttccaatcttctttcagcacgctctgatccatctgctacaacaaccatacccgcatgaagtgaatatcccatgccaacaccgccaccatgatggaatgaaatccatgaaccacctgcagctgtgttaattagtgcattcaatacagcccaatcaccaaccgcgtcactaccatctttcatactttctgtttcacggttaggactagcaactgaaccagcatctaaatggtctcgtccaataacaattggtgctgaaatttcaccgtcacgtacaagacgatttaaagctaagcccattttcgctctttctccatagcctaaccaagcaatacgtgatggtagtccttgatatgaaattttttcttcagctaaatcaagccatcttaataacttttcattttctgggaaaagtttgcgcatttcttcatccgcacgctcgatatcttttggatcaccactcaacgcagcaaagcggaatggccctttaccttcacagaataatggtctaatgtaagctggtacaaaacctgggaagtcaaaagcatttttcactccgttattgaaggctacttgacgaatattgttaccataatcaaatgctacagctccacgtttttggaattcaagcattaattcaacatgctttgccattgaagcttgtgacagttcaacatattttttcggatctttttcacgcaatactttcgcttcttctacagagtatccttgtggcacatatccatttagcggatcatgtgcacttgtttgatcagtaataatgtcaattttaaatcctttttctagaatcgcttgatggatgtctacagcatttccaactaacccgattgataatccttctccacgttctttcgcctcttctgctaattttaatgcttcatctaaatcagctgttttaacatcacagtatttcgtatcaattcgcttatcaacacgtgtttcatcaacatccacgcaaattgctaccccatgattcatagtaattgctaacggttgcgcaccacccataccacctaaacctgctgtcagtgtaacagtgcctgctaaatctccattaaagtgttgattacctagctcggcaaatgtctcataagtaccttgcacaataccttgagaaccaatatatatccaactaccggctgtcatctgtccatacatgattaaaccttttttatctaattcattaaaatgatcccagtttgcccattcaggtactaatactgaatttgaaattaatacacgtggcgcttcttcatgtgttttaaatacagcaactggctttcctgattgtactaacattgtctcatctgattctaattctcgtaacgttttctctattgcttcaaaagcttcccaattacgagctgcttttccaataccaccataaacaactaaatcttctggtctttcagcaacttctgggtctaaattgttgtataacattctaagtactgcttcttgttcccaacctttacattcaatactcaaacctttttttgcttgaatttttctcataaaattcgctcctgttctttttagaagttaattccactaaatttaaaacgcttacattattatcttcaatattcattatagtatgttaaaatatagccaacaaatataaataaactaattatccatagcttgaatctataaataaaaggagcaaaacacatgaaaattattcagttagaatatttcttggctatcgtgaaatataatagttttactaaagctgcacaatttttacatattagccagccatctttaactgctacgattaaaaaaatggaagcagatttaggttatgacttatttacacgttcaacaaaagacatcaagattaccgaaaaaggaatacagttttatcgttatgcgagcgaattagttcaacaatatcgatccacgatggaaaaaatgtatgatttaagcgttacatcagaaccaaggataaaaattgggactcttgaatctacgaatcaatggattgcgaatttaattcgaaagcaccattccgactactctgaacagcaatatcgtttatatgaaatacatgataaacatcaatctatagagcaattactgaattttaatattcatttagctataacaaatgaaaaaataacccacgaagatataagatccattcctttatatgaggaatcttacattttattagcacctaaagaaacatttaaaaatcaaaattgggtagatgttgaaaatttgccactcatattgccaaacaaaaattctcaagtgcgcaaacacttagatgactattttaatagaagaaatattcgtccaaatgtcgttgtagaaacagatcgattcgaatcagcagttggatttgttcatcttggcttaggttacgctatcattccgagattttattaccaatcatttcacacgtccaatttagaatataaaaaaattcgtccaaacttaggccgaaaaatttatatcaattatcataaaaagcgtaaacactccgaacaagtacatacattcgtacaacaatgccaagattatttatatggacttttagaggctctttaacttaagtaattagagcctcttatgcagtcgcgcagtcaactgtataccttttgtctttaacttaagtaattagagtctcttatgcagttgcgcagatcatcgtataccttttgcctttaacttaagttattagtgcctcttatgcagttgctcaatcaactgtatatcatttgcctttaacttaagttattagtgcctcttatgcagttgcgcagtcaactgtataagaatttcacacccaattttatgatttccatgtataaatcattacattcagaccaacaaacataaataagcagtaagatgactacaacttaagagtcttcttactgcaattatttttcaaatatatcaacgttaatataacttctattacgaaatactcacattctgccctgcaatgcaaatttcgtcacatataaatatttttaattattttaaaaaatgatgcactaaattagcaacgagcttcgcagttctattgtcagcgtcatatgttggattcatctcagcaatactaactgaagacaccttatcacttggaataatacgttttgccaattcaagaacagtatgtggatacaaacctaacactgccggcgcacttaccccaggcgcaaacgcactatcaatgacatccatacaaatcgtaaacataatgacatcatgttcatgtacaaaacgttcaatcatatctttaattgttggtgatacgtgactcaataattcatctgcaaagacataatcaatctttttctctttagcataatcaaataaactttgcgtattaccaccttgagcaataccaagcactaaataatctgtgttttcatcttcttctaaaatttgtctaaagctcgttccagatgtagattgttgttcagcacgtgtatcaaaatgcgcatcaatatttatcacaccaatagattgtgttggatagactttacgtgttgctaaatattgagcatacgcaatatcatgtcccccacctaataaaaatgtttgtctatgattagcaattgacttcgctgcaagcatagcaaattctttttgagtatcaattaattcctcatgatcatgataaacatttccgtaatcgactaaagcttcacattgattcaaatccggcaaacctgcaaatgcttgtttaatcgcatctggtccttcttttgcgccaatgcgccccttgtttaatgcaacaccttcgtcaacagcatagcctaatataccgacccctgatggcctactactcttttccagcttagacaaatcttcaaatgttactgtttgaaaatgtctaaattttttcgggtctgtttcactatctaaccttccagtccataaatttggttcaccttgcttgtacacagcatttccccctcttatttatgtggcttattaacaattaaagtataacgtataggaaattttgaattcaattcatagttaaatccgtatcttaaaaatagttaactacatttcttttacccctattttctatgtaataacgaatacttagctgatttatgttaataaaatacgtcaagactattacattttcattaatattgacatagacaatttatctctcggcttgtaatatgtataattgttactaaaagatattttgcttgttacctaatggaggttacatataatgaagaacaataaaatttctggttttcaatgggcaatgacgattttcgtcttctttgtcattacaatggcgttatccattatgctcagagatttccagtctataattggtgtcaaacactttatatttgaagttacagatctagcaccattaattgctgcaatcatttgtatactcgttttcaaatataaaaaggtccaacttgcaggtttaaaattctcaatcagcctgaaagtaattgaacgtctattgctagctttaattttacctttaattattctaattattggtatgtacagctttaatacatttgcagatagctttattttattacaatcaacaggcttatcagtacctattacacacattctgattggacatattctaatggcgttcgtagtagaattcggattccgttcatacttacaaaatattgttgaaacgaaaatgaacacgttctttgcaagtattgttgttggtttgatgtattcagttttctcagcaaatacaacttatggtacagaatttgctgcttataacttcctttatacattctcattctctatgattcttggtgaattaattagagcgactaaaggacgtacaatttatattgcaacgacattccatgcttcaatgacatttggacttattttcttgtttagcgaagaaatcggcgatctattttcaatcaaagtcatcgccatttcaacagcaatcgttgcagtaggatacattggtttaagcttaattatccgaggtattgcatatttaacaacaagacgaaaccttgaagaacttgagcctaataattatttagaccatgtcaatgacgatgaagaaactaatcatactgaggctgaaaaatcttcttcaaatattaaagatgctgaaaaagcaggtgtagctactgcatcaacggtcggtattgctaaaaatgatactgaaaatacagtgactgacgaaccaaacattcatgaaggtactgaaaaaacagaacctcaacatcacatagataatcaaactgaatctaatcatgatgaagatcatgacatcacttcggagtcagtagaatcagcagaatcagttaaacatgcaccacaaagtgacgatttaacaaacgattcaaatgaagatgaaatacaatcattaaaagaacctgcgacttataaagaagacagacgttcatcagttgtaatcgatgcagaaaaacatatcgaaaaaactgaagaacaatcttcagataaaaacaaataataacaaagcgcttgctagtacctcttaagaagatgatgctagcaagcgcttttctatactattattatttttctaaaattttaacaccctcttgagtgcctacaataacttgatctgccatatctaagaagtatcctgtctcaaacacacctgtcagatgaattaaatactcatggaacttatatgggtcaattccttttggtaacttacaatctaaaatataattgccattatcagttataaatgcgacgtcttcgtttacacggcgttctacttttatatcagcgtatgattcgattttacgtaatatgtgataccagttaaatttatccacctctactggtaacttaaacgtctcacctaagtattgaaccattttcgtttcatcgacaaccacaacaaaacgcgatgccatttcatctatcactttctctctgaacagcgcaccaccgccacctttaattatatttaaagatggatctacttcatcagcaccatcaatggctaagtcgatatgatcaacatcattgatttcgcatattttaatacctagttcttttgctaaaaatgcaattttattagaagtgcatacacctgtaatattgtaaccacgttctttaattagttgcgccatttgaggtaagagtaattccattgtacttcctgtaccaattcccagcgtcatgtcaccattgatttgacttaaaacatcatttaatgtcattaacttgagtgctttgacatctttcatgaaggtagcctcccatatttatgtaatctattcaattcatattttacatgactcatataaattaacatacccttatttctaacatttttttaaacatatcaatcagaatttacaattctaaaaatgttttatagtacaatatactttaacttaacgttaaggagaatgatatgatatcaattcacgcaatttcgacaggaaaaatccaagatttgccttatagctcgaaaagaccgatgcgctctgctttagataaaactaagatttcacaaacaacatggttatcttcaactggtttcactggtgatgaacaggcttataaagatcatggtgggccacataaagcagtttgtgggtttagtaaacataattatgcactgtatcaagatgatttaccttcactacctactcatgcgatgtttggagagaatttaacatttgattatttagacgaatctgatgtttactttggtaatcaatatcgtttaggtgaagcgttaattgaggtttctgaaattagagaaccatgctggaaaattcaagcaaaatataatattcctgatttagtgaagcgcatgtctacatctggtaaaacaggtttctatttccgggtattaaaacaaggctatgtatctccaaatgatcagctttacttaatacaagaagcaccaatcgaacatcgtttatctgtacaacagcttaatgacctttattataatgatagacaaaatcaagatatgttacgatatgcactaaacaatccatttctgtcaccaacaagacgcgataaacttcaaaaaatgtataacagaacattgaaataattacctttcattataagtgttaaatgaacttttcaaaacaaaaaggaatcaacttacacatcgtttgtataatagtcttatctataactactgatgctattgattcctttttaatgttatatattttctttatttcaaactgtatattaaagatgtcacttcatttgatacgattcttgataacctattcaaaattctgccaaataacataaatattatataaatgccgatacttttaatcattttctactttttcttcgatacggaaacttgttttcgaattgaacacttcaccagcttttaaaattgacggtgctttttctccatataaattaatatcatttggtaaaaattgtgtttctaatgtaaagccagaatgtggtttataaatattaaatggactatcccactcatcaggctgattaaaagtaaagaatacaacatgaggcatatctgtatcgacctctaacataaattcatgattttcaacatacattttatgttcaccaactgtaaatgggtgatcgagaccaccaaaacgtgtcatttgttggcttaattgcgcatgttgtgatgtaaaaatatcactcaattttatcttgttatcttcaaacacttcatgtaaatctagaatatcacctgtaacaatatttcgctcatctaatacatacatatctaatttattacttgaaatgcgatgattatcaacgacattattatctcgattcaaattgaagtacacatgattcgtaggactaaacaatgtgtcttctgatgcaactgcttcgtattcaatcgaccattggtgatccgcatcataaatatgtgtaatcgtcacatcgatatcacccgggaaatgatcatcagctgatttcaacaccgtcttaaatatcactttaatttgagcaatttcatttctaatttcataatcaaataacttattgtccaaaccatgacagccaccatgtaaatgatgttcgccgttgtttttttctaactgatattctttacctttcaacttaaatttagcattatcaattctaccgctatatcttcctatagaagcaccaaatttaaaaggattactatgataaaattcatccgcttcaacaacatttccaagaacaatattattatcatgatatttccaagacactactcttgctccataattcgtaaaaataattttagtttcatcattatcaattttgattaaatctacaccttgtctttggtgctcaacttcaactatcatttttacttctcccttctaaccacaagtgttcaagctctgctgggtagcaacattactaaaacacctacaatacaaatgattgcaccgataacatcatatttatctggcatttgtttatctacgaccatcgcaaaaatcaaactcatgatgataaatacgccaccatatgctgcatatactcttccgaatgatggaaatgattgaaatgtcgcaatgacaccatataacatgagtatcacaccgcctattagcccaacaagtgaagactgtccttccctaagccacagccaaatcaggtatcccccacctatttcacataagccagctaatataaatataaaaatcggatataacatgaaatcactccatcacacatttgctaccaataatctatcggctacacatcatttgtttacatttcttcttacttcacattcccattttaaaaagttcgttttcacattcatattgtacacttttttagacattattctatagctaaatataaaaaaataagagtaacacgctttcatcatcattttatatgataaatgtgtgtcactctcatcaattttattttttaaatacacgtttcaatgaattaaataagccacgttcaaatgtaagtactgaatctttatatgttttaattgcaatccatatcaagacagctaccattacaattgagattaatgaacttaagatgacttcatgtatttgaagccctgaagtttgagcgcgtacaactaattgaaatggcgctaaaaacggaatataacttgtgattaaagcaagtcgcccatcaggattatttatcgtgaatatcgcgatataaaatgcaatcataccaagtaatgtcattggcatcaaagattgatttaaatcttctattctagatgttaatgatccgagaatggctgcaagtaatacatacgccataattccaacaatactacttataattccgacaataataatttgccaagacaattgattcatttccacgttaaaaccttgtagcaagtcttttaagtcaaaggcaaaaatgcatataactgccatcaatacaattaaaataatctgagtcacggcaactgctataacgcctaaaattttagcaaaaatatgttggattggtgaaatacttgtaataatcatttcaatgacacgcgatgttttctcactagcaatttccatagctatttgagatgcataatttaaaacaataaagaacattagaaagataatgccataagctaaagcatagttgaaaatcttttgtccttctgatactttatcgacttcatcattagaaatcaccttattatcaactttactttgtgcttgtaatttttgtaagtcttctttgttgatatttaattccccggctaccatatttgtttgaatagctgtaagcagtgcttgtactttttgtgaatcttcatgacttactcgcttctcactaatgattgtcccttgtaacgtgcgattttgattcaccttgataatataagctttatcaagtttatgtttttttacttctttttcagcatcttctatagaaactttagtaaacttagcatcactatgaaatgtattcgcctgttgcttgaaaaccttatagatttgttcattcggtgctgctacaccaattttatctggaccatcatcaaacatgttaataatcttatcaatgttagataggccaatcattaaggcagcaataataatcataaaaattacaaatgatttagctttaatttttttgatatatgtcaaactaaatgtcgcccaaaacttatgcatccttgccaccaaccttctcaatgaatatatcttgtaatgatggttctacaacttggaatcgtttaacataaccttgatgtgccacaacttgataaatatctttggctacgtcttcattctcaatcgtcaactgaagacctttcttcatgttttcactatgaatgatgcctctaatgtgtgttaaatctggtagtgttgtttctgactcaatgacaactttcttgttaccattagatgcacgtacatgattgatatcaccagaaacaacaagttgacctttatctaaaatacaaacatcatcacataattcttcaacatgttccatacggtgagaactataaacgattgtactgccccaatcatttaagtctttaactgcttcttttaataactcaacattaactgggtctagaccactgaaaggctcatctaatattagtaattctggtttatgtaacatacttgctaacagctgaattttttgttgattcccttttgatagactatcaattcgttttttgcggttttcagtaatatcaaaacgctcaagccaatacgatatttgctgttgtatttctgtttttgacattccctttaaagttgccaaatatttcaattcttcttcaactgtcaatttcccatgtaaaccgcgttcttccggtaaataaccaatacgattgtacattgttttatctagttttttaccgttatacgtaatgtgtccttctgttggttcacttaagcctaaaatcatacgaaatgtcgttgttttacctgcaccatttcttcctagaaaacctaacattttgcctgattctaactctaatgacatatcatttactgctgtcatcttgccaaaacgtttcgtaacatgttcaattacaagtcccatactttgcctcctaaaacaatatgtatttatcttaatataacatttctattctctataaatgcaatatttttaaagtgaatttatttttaaaatttctgaaattgaaatatttaaatagtatcttctttgcatgttaagtatcatgagcgttaactccccattttccatgcctttattgccttattggtaaaaaaatatcccagcatcattgtgccgagatatttatatccttacaattgattatctgtttcttccggtgttttcggtgtttcagatgtacccgctttttccggtgtttcagatgtcactggttgatttttaattgaagatgggtattttgggctttcgccatatttatttgccggcttactgtcaaagcataggaatactatcattgtaactgtaagtccaaaataaataagatatagaagtactaacaaaataacaattccaattggcataaacataaaatcattatcataatatgattcgataaactgcaccactatagagaatacaatactaaatgcacacattataataggcaataccattgttcttgatatatcgtggaatcttcggacgcttaatgccaaattgggaataaaggttgctaaagaataaagaagcatatatataactgtaagtattaatatcatcacaccaaacatagataatactttagcatctatttcatcacctatacccacaaatactgctcccataaagaacacgaagaaagcaggaagtataaatattaaatgccacaacatcatataccaatattcactacgtcttgatctccccttaaaatttacataatttttccaaaataatacgaatgatttcataaaacctacttgaggtaattgttccattgtaatctccctttcgttaatcatatttatatttttaattattattaccgttataatttacaagattcattatcaagccacttcatttcaatcgtcgttcactttggaaaatgaactttatatttcatcactagttaaatgaaaacccgctacaagtacgcatctatatggagactcatttgaaagtcaacgcttcgttaactatactaaaaatatgtcacactgcaatgttcgcgttcaaaagagactcaatctctgcaaataaaatattccataacaaagtatatactttacatttttataattcttaacaatactattttatcaaacatttaacacaataaaaatatctttttcatttttatttaaattaatcatataattgcgaggagaatattatggatttcgttaataatgatacaagacaaattgctaaaaacttattaggtgtcaaagtgatttatcaggataccactcaaacgtatacaggctacatcgtggaaacggaagcatacttaggattgaatgatcgtgcggctcatggctatggtggtaaaataacacctaaagttacgtcattatataaacgtggtggtacaatttatgcacatgtcatgcatacgcatttactcattaattttgtaacaaaatctgaaggtatacccgaaggcgtacttatccgcgcaattgaaccagaagacggtttatctgctatgttccgtaacagaggtaagaaaggctacgaggtaacgaatggcccaggaaaatggactaaggcatttaacattccacgggctatcgatggcgctacgttaaatgactgtagattgtctattgatactaagaatcgtaaatatcctaaagatattattgctagtccacgaatcggtattccaaataaaggtgattggacacataaatctttacgttacacagtgaaaggtaatccatttgtgtctcgcatgcgtaaatcagattgtatgtttcccgaagatacttggaaataaatgccatctttcattgattactatcatgaaaatgaaatctatctccttataagtcaatcaatcagccgtcaacatgcggatgggttgattgtttttctttgtgtccatcatattttttgattcatctcctcttattgaacttgttcttaattataaaatataacaatagaattatttataattattaaatttagatgcattaatattattgatattattttcaaaaactagaaatattgatttgttgcatgtataatgttgaaagtgcccttttataacgcttacatataaaagcttatttagggagagggatattcaacaagggggatttgaaaatgatagaacttaatgcaattacaacattatgtttagcctgtatactttacttacttggtaaagctatcgttaatcacgttaattttttaaaacgcatttgtataccagcaccagtgattggcggcttaatctttgctattttagttgcggctttggattcatttggcatggttaagattaaattagatgcttcattcattcaagatttcttcatgttagcattctttacgacaatcggtcttggtgcatcattgaaattatttaaattaggtggcaaagtcttgctattatactttatgttttgtgctatcatttcagtcattcaaaacatagttggtgtatcactagcaaaagtattaaatattaaaccgttactaggattaacagctggttctatgtctatggaaggtggtcacggtaatgctgccgcttatggtaagacaatccaagatttaggcattgactcggcactgacagcggctcttgcagctgcaactttaggtcttgtatttggagggcttatcggtggaccagttgtaaaatttttaatcaaacgttataacttaaagcctcaacatagtgacgatacatttaaagattatagtcaagtagcatataacgaacatttacatagtaaatttaatgccactgaagtattcttcattcaatttacaatcgttgtattctgtatggcagttggaagttatttcagtcatttgtttacagctcaaacagggattaatgttccaatttacgttggctcattatttgtagctgttattgtccgaaatatctctgaaagttttaattttaatattgtagatttaaaaattactaatcaaattggcgatgtcgcattaggtattttcttatctcttgcgctaatgagcattcaattaatcgaaatttataaacttgctatacctcttattattatcgttttagttcaagttgtcgttatgattttatttgctgttttaattttatttagaggtttaggaaaagattatgatgctgcagtaatggtaggtggttttatcgggcatgggcttggtgcaacgccaaatgccatggcaaatttagatgttattactaaaaaatatggaaactcacctaaagcatatttagttgtacctattgttggtgcattcttaatcgatttaattggtgttatagtcattatgggattcattcaatggtttagttaaacaccaaactcataaataaaagaggaggccttcgcctcctcttttatttatcctcgatgtatattcaagttacgttgttctatccatgacaatatttccggactaaatacgatttgtttttgtgttaagtcgtcaatatttttagcatctaacatcgtcattattgatttcatgtgttcaataaatgattctacataagctactgtatgtgcaatgccattattttcaacttgatttaaaaacggacgtgacataccagttgcctttgcaccaagtgctaaacttttaattgcatcgagtggtgtacgtaaaccaccactcgcgaaaactgaaacttcgctttgataagccgttgtttcaagtaatgactcaactgtagactgtccccatgatgataagtaatccatatctttatttgcacgacgttcattttcaatatctacaaagttagtaccacctttgccactaacatcgacatacttaacgcctatttgttgtaagtcatgcattaattctttgctcataccaaatccaacttcttttataatgactggaacagacactcgtgatacaatcgacgctatattatctaaccaagtcacaaattcacgattcccttcaggcataactaattcttgaggagaattaacatggatttgtaacgcttgtgcctcaagtaattcaactgcttccaaagccttttctactggtacgtccgcaccaacattgctaaaaatcatgccttcaggattcatttttcgcgcaatcgtaaacgtctcagccatgcgtggatttctcaatgccgcatgtgttgacccaactgccatcgctaagccagtttctcttgcaactacagctagcttttcattgatgtttttcgtccactcgctaccacccgtcattgcattaatataaaccggatatgccatcgttaagtcaggcgtctgtgatgtcaaatcgatatcatttacattaattgatgggatagaatgatgcacaaaacgcatcttatcaaaatctgattgcattgcgtcagattgagccattgctatttcaacatgttcattttttctctgttctctttggaaatcactcatgattaaacctaccttttcgtcatttctaatttaaaaccattttttacgtctgaaaaagatgattaatacgacagctataacaaacattacagctaagcaaatataatatccataatgtaaatgtaatgccggcatatttacaaagttcataccataaatcccagctatgaatgttaacggtgaaaatataactgatactaacgttaatacttgcataatactattcattctaaatgacgtgtatgactcaaaattttctcgtatttcgtttgtcatttcttgagcagtacgaatgatattacgttgcttaatcaagtggtcatcgatatgttgaatgtatagcgaatgtttattatctataatcaaatcaccattttgtttcattgtatcaattagctcttgcataggaaacagtacacgttttactttaatcaaatccgaacgtaacttaaagacactatccatgaccattttattaaagcgatcatctacatggcggtcttcaaaatgataaacactatcttcaagtgcatatacaaagttgaaatatttatcaaccatcatatctaaaattaatataacgacatctgcacaatctaattctgcatctaatgcattcatatacttatagactactttatttaatgattccaacgtttgatgatgatatgttactaatacgttgtcttgtataaaaatatttagtgctattggtgaatagtttgaccccataatactatggaatactaagtattgataatctttataagatttatatttagctcgtggcataccgttaattgcatcatccacttctaaatcattaaaattaaaatgtgctttaaaccattcattttcttgttcattcggttcatcaaaatcataccaaacaatagtcgcatcttttggtatctctttgatatcatcaactactttaaaaggttcatatgtagtttgataccgtatcgttaaagccatcgatactccccctaaataacgaattctctattattttatcatgaattaaataacgtgtatgtcttaatttattttagtatgatagtcactaaggagatggttattatcaaacaactttttacacatactcaaaccgtaacatctgaattcattgaccataacaatcatatgcatgatgcaaattataatatcatttttagtgacgtcgtgaatcgttttaattacagccacggtctttctttaaaagaacgcgaaaatttagcatatacgctatttacactagaagaacatacgacatacctctcagaattgtctcttggcgatgtatttactgttactttatatatttatgattacgattataagcggttgcatttatttttaacattaactaaagaagatggtacactagcatcaacaaacgaagtaatgatgatgggaattaatcagcacacacgtcgttctgatgcttttcctgaatcattttcaacacaaatagcacactattataaaaatcaaccaactatcacttggcctgaacaattaggacataaaatagcaattccacacaaaggagcattaaaatgacagatgcattacaacaaaagattcatatcgaattactagatttattagatgatgttaagtttgaattaacagaattaaatgcacaaaaagggttatacattaacggaccagcaaatcagctacttaagcgtggcgtgcatatggcttatgttcaaggacaaaagcaagctatcgataatattatgactattgtggaacaacagcttgaagatcaacatttcctagaacattatgataaatttcaaaatgaggttgctcatcgcaattatgataaaacagctaactttgcagaacttagtgatattccacgtcaattcgataattttttagatcaattttatcaaattaaagggcaatactttatcatcacacatatcaatacacttattggtgattttcactcagaagcttattaacaattagtctatataatccttgctatattttcaaaaacaaaacccaattgcgttttcatgtcaaatatcatcttccatgaaatcgtaactgggtcaattgtatgctattagttattttgtgttacatcctcatctatcgatttggcaatttgtttaatagctttatgtgattgtctaattggataaattggaaaatcatgtaccatcttaggataatcataaaactcaatgtattgatgatgttgcaacatcatttgttcgaacagcttcatatcaggatgtgtcatttcacgtccaccaccaaacatataaactggtggtaatccttctattgtgccattaatcggcgatatgcgcttatctgttaatggtaggccattcgcccattttttcataatctcattgacaccaaactgacttagaaccgcatcttgttcgattaaagcgtctgaaatatctttattagatagtgttgcatctaaaattggtgagattaaatacaatttattcggtaatggctgttgattgtctaaaagagattgtacaaaggataatgccagtgcaccacctgaaccatcacccatgactacgacattttgatggcctacttcagatactaattgatcataaacacgttgtatcgcttggaaagtgtcgtcaatatgaaactctggtgtctttggatagataggcagtacaacctcatataatgtacttaaagtgatcttatccaacaatctccaatggaacggtgatggttgtagtgcattgaatccaccgtgaatatataaaattttcttatcaatttgatgtctgaaattaaagcgaaagacttgcatatcatctaatgataatttttctaaatttgctttaacatttaatgttgaaggctgcttatgtttttttctattttcaatttctcttttataaaaaaatctttcaacatcttgatcatttttaaacataatcgagcgattgtgaagcaaatatttattgacaacgctattcataacacggtttctaatcaatgtcttaacctacctttatatattttatgtatccaatgattgtctatcccctacattctttgccaaaaaaagtatataatgtagaagatattttctttttcactttcaaatttaagactacaattgaacagtgatttttcatcattataacagacaactagacatattgataagtaaagaaaagaactttatacggaggtaccttgcatgacaaatccaaatcaacgattagaaccatttgatgagacatttcaacaatcgaatattcatcgtggtaagcgatatggtaagaaaaaacgttcattggtaagcatgattattcaaatcattgttgttatattaaccgcaatcgctggatacagcatgtggaaacaacccatttttaatattgtcttcaccaaagaatctgtagattttgatggcattaaaaattttaacgagacaattggaaaaatgcatcaattaaatattaatttgggtaatatcaatgatttacaacaaggaatcgatcgcttaattttagtttttaacggtttctttattttatgtatcgttagcctagtcataacaatactgacaattatatttaatcgcacagttctaaaagtggtaaatattttagtgttaacaattatgttagtcattacattgtatttcagttatattattaaagcactcgcacaagaaattgcagatgtttttaaaaaatattatttaaatgtaccaccagatcaagtgattacagaagctgacgctattcataacggcatcattttactgggctgtagcatcggtttacttgttataagcttattcttccgtaatcgcatgcctcgtttaaaataatgttatatagtagggattgggacagaaatgttattttcacaaaattcatttcgttgacccacttcctgctttttctttattaataacctactacgtcaatgccaaattttaatataattcctctaacattctacaaattaacaaataaaaaaagtatcgataaccatatattggcaccgatactttaaaaatcatgtccccacaacataatttttgattagtcacacttcaattaattaatttattttatttattcatgattgatactattatctgcatctatcttttgagccgtagcttttgcttttttgttactttgtaaaaataagcataaaattaaagcgatgatgctaaatatcgttgcaactataaatgcatcattaatcccttcaactgttgctagtttatttacaaattgtaataacactttcattgcgccttcttgaccaccatattgcgatgctaattcacgcatatgatcttgtacaacaggattcgttttatctaactcttccccaaaagctgataaatgttgtgtagtttgcgttgtcattacagtaaccaagatcgctgttcctatagaaccagctagttgacgcatcgtatttaagaaggcattaccatgggaggcaagtcgtcccggcaacgcattaatagctgctgttaccattggcatcataataaatgccataccaaatgaacgtagtacatagatgcccatgattgtcatatatggcgtatccatattcaatttagttaattcccatgttgcataagtcatgacagcaataccaaaaatggctaaaggttttaagccaatcgtgtctaacaacttaccagcaaatggccctagtagacccataattagagaaccaggtaataataacaatccggaatctaatgctgagaaaccacgtaaattttgtaagtaaattggtaataaaatcatacccccatacaagctcatcattacaaccatattaattactgttgttagtgtaaatgttggaaatttcaatacttctaaattcaacattggtgctttcattcttaattctcttattacaaatagaataataaagataataccaatcgcaaacattgtttctatctcaacagaaccccagcctttgttccccgcttctgaaaagccgtataacaaagcaccaaaaccaattgtactaaaaatgatacctgggatatcagctttagggtttgtagtatattgatataacttaaaccatacaaaaccaactaagattgcaataattccgataatgaacataccgtaaaacatcacattccaatggtaattttgtacaatatagcctgataatgttggaccgattgcaggtgctaaaatcattgcgatacccattgtacccatggcagcaccacgtttttcaggtggataaattgtaataataacaattgaacctaatggcattagtacacctgcaccaatagcttgtaatacacgtccaaccatcatgattgggaaattcattgaaatcgcacatattaatgaaccaattgtaaagagtactaacgcaactaaaaataattttcgatatgaatatttattaaatagatacgccgtaattggtattaaaataccgtttactaacatgaatcccgtcatcaaccattgccctgttgacgcagaaatattaaattccgtattaatttttggcaaagcaacatttaataatgtttggtttaaaatcgcaataaacataccgaataataatgccgctaatattttaccgcgtgaaacaccttcaccaaaaatataatttgtatgttcttttttaattttctcatttactttatattcttctgattcaggatttttagcagcaaatgcttcatcatccttattatcattgaataattcttgatcttgttcagaccctttcgcatgatcagttagactaacttgattctgattgtctttattgtcaatacgtgcctcttcacgcgctgtatgttgtgacgattgatcagttgttctgtctaaatcacttgctttaaatttagattgatttgattgacatgtcgcaaaatgttgttccttttgttggcgttttgcttttcttcttgatcttattaataataaattgataaccccaacaataatgagcgctaaaacaatgtagctaataatgaaggtcgtagtcatttaatgacccccttaatttttatgaatttttacttcagcgttcattccaggaacaacttgtttagacggttctgaatctaacgtgattttaacaggtataacttgagatactttagtatagttaccatcactatttgatgatggcattaatgaaaaactagcagcagtagcttttccaatactatcaactttacctttaacagaagctttttgaccgtcaatagtcacatcaacatctttaccaacttcaacatctttaatgtctttttcgtcaatatttgcagttacatataaatcatctaaattgtaagcataagcaattggattgcctgcttgtaccatagaaccttccatgccatctaatttagcaattgtacctttttgtggcattttaagttccatatctttagtttcgccatcttgaccttgaacagtaactgttgctactttatcacctttatcaagtttatcaccttgcttaacatttagtgatttgatttgcccagaagctggacttgctattttaatttgatcgccatttactttagcattatcagttgttatataacttgttgttttattccagaaataaaaaccagcaatcccaattgctaacagtacaacaaccgtaatgacattaattaatatcatctttttcatgaaacatttcctcctatttgcttttaaaattcactttatttattatagagacatgataactaaaaaaacaccaacaatttttataagagtgttggttaaaattcacaaaggtgtaacaatatgaaacgacaagccaaaatagaaattcaaaacgcacttgttgatttgatggctgaatatccttttcaagaaatatccactaaaatgatttgcgcgtattgtaatattaatcgttctactttttatgattattacaaagataaatttgatttattggataccatcaactcaaagcataaagaaaaattccaatttcttctaagcgcgctacatcataatttcgaaaatattaaacaggataagcttaaactttataaattcttcattattattgctaagtatatcaagcacaatgagcagtttttcaaagacattttagttacctacccaatgaaaacattattcatagactatataaatttagcgagagattactatcaacaaattatgaatgactatagtactacagtaaccaataaacagctttatgttacatatatcataggcggtcaagctggagtatttattaattggctttcgaatggttgtaatgaatcacctgaagaagttgctgacattttattggctaatacgattaaacttcaaaaccaataatacggtttcattctaataaagaaatgctataaaacaactagataaagttaaaccaaatggacagataatagtacatatgtaacggtgctatcaaaataaaaatgccgagatttccacataataatctcggcatttttatttttgatgctaaattcataggtctatgaatagctcatgttttgttttttaatttttcaattcaatataatagaagaaactatgtttatcatcgatttgttttaaataccctcatattataaatctgtaaaataattaatataactgctgtagctataataataattatgtaaggtataggattatcttcaccttttacccccactaatggcgatgcaataccaccaaataaaaactgcactaaacctaataaacttgatgaactccctctaccactactactttcatccatagctattgtaaaaccaagtgtcgcaacacctgtcactggtgctattaaaatgataaatcctatcgctaaaatccaaaagttccaatgattaagcaatacaatcgtcactaaaattacaccgataatctgaatcatcgtcatgcctctcatcaatttttgtgagtctacaaaatcaacaagataaccagtaagttgacttgatataatgagcgtaataccaattcccgcaaacatccaactaaattgtattgcagtcatgccataaattttttgaataataaacggagacgcagaaatataagtaaataatattacaaatgtcataccttgaatgagcattggtaatacaaaccgtggcgtcttcaataatattttgaagtttttaaacattgtctttaatccactacttgactcacgatttgtcactgttaatgattcaggtacttttaataaagaacctatgaccatgacgaagccaaagatagtcagaatgacaaagaccatacgccagacagaataatttaaaattatacctcctattgttggcgcaacaactggtgcaataccattaacaagcatcaataatgccataaacttagttagttcattaccactatacatatcacttgctatagctcttgaaataactgctgctgctccacctgtcactccttgaagaaatcttaatgcaaccatcagccaaatattatgtataaaaacaatacctaaacttgctaatgtaaaaataatcatagctataataagcggctttttgcgcccagttgaatctgaaattggaccagcaaacaaattaccaaacgctaaaccaatcataaacatcgataatgttaattgtgcgttagacgtcgttgtttgaaaatcctgtctaatatctggtaatccaggcaaaaacatatctattgataatgctccaatggccgtcaaagatcctaaaataataataaatatcggtgaacacttgttaaaacgctttaaatcattcactatatttcctcctttataaaatgattagtttataactatcacgaacagaaactaattttaaatatgctcttttatatattagcattactcacaagtttcatgaacatcattacaacttataaaaggtataaaatgatataaacctcagcactccataaattttttcacaaaaaacaatcccttcaaagtaatttacactaattataaatactttgaaaggatattgttttattccatgacacatgcatcttatttaagttttatactctatttttctgatgtcttgattaattgcaagcggtcttgcgaaccttgttcaagctcatattctttatctacttgcttaccgttttcatttattaatcttacggttgcggtaatcttatcaccatgtttttcggcatctataatttgtggtgaactaatcatcattaaacttcctttagatacacgcttctttacatcatcataaaaagatgatcctttttttatatatgacgatacaaaatcaaaatccgactgattaaacgcagcattattcgctaaagaatatccagcaaagaattctatcaatttgttcttcaagctgttttcttctttttctttcttttcaacatagtcttcgatatcttcactgtcaaaattcaaagttatttctgtattgtattttaaatcgctggctttaatcgtcttcgtctgtgttgtaaatgttttacctttcgctttacctgaagctgaaatggtaatatctttattttgtggatatggaccatacgttttggaacttgaaaatgccatttcacggtcatttatagttacttttttagaactatcatttaattttgtatcgccttttaaagttacagatatatttgcttcttcaaaatcttcagtaacatctaccgtttcagaattactttgtctaaaatcaaattttaaatggcctgcaaaatcaccgttctcagttgatttcatagctggaattctatatgtccccggtataaaattacctattggcgtcactttatttgcttcagctataaccatctttttcttaccaccagatttaaactcatattttgttttttctttcggtttaacaattggttgcttggtaggtgcagtaaagctcatattatcgaaaaagatataacgtgtgccatttttacttacacgtaatatattttgaccagatctggtttgaatataagaagctacgctggtcttactcttattcaatttatgtaccgtatttttaaggtcgctgacaaattgcttaagcccaacttcatctttgatatagttaatgtatactttcgcttcttcagaatctactttattatctttagtacttaataatgttgctactttttgtttatcattattttcaatcgcattcactaatattttagtttgcgcttcaggtgaattgaagtttcttagtaaaaagaacaatataataattaagattaaaatgaaaaaaccaattgcccaaggcaccatttttctcatcttgatgttattagtttgtatatcttcatcggttgactttctatataatgcttgacgactatcaaatttatgtccacattgtgtacatatctgtacatcatcttgtgcttgttgtccgcacttcgggcaagatttcatattttcacctcaattctgttcctcttcaattgttatatgtatatcacaaaaattattttattattttaccattattattttacaaatattatcccaagaatacaattcaagaaatgattaactttactttagaattgtaccttattacattatttatgaaagtactctctcaattataactaaaaagaaggtgttcaatacatacatatttagtcttatatttgaacaccttcaaaaacctatttatgattgctatatgttttaatgcgatgattgatgacttctaatacttgccttacattttcaatatcttcagaatttaaatcattagtaatatcttgcgcaatatctgtcataatcgcattacgttctttcaaatatgctctacctttgtcagttaaggttatgaatttcaaacgttgatcaatatttaaatttggtttatctaacttaactaatttagcatcgattaactttttaattcgtcggcttactgcggccttatttacaccttgtctttgcgtgatttcactaattgtcaaaggttctttatttaacatacctaatacgttagactgctctaatgaaatttcatattcattttgtaaatctttcaacatttttgcagttaatgcgttaacgttatttataaactgctctaaaaattgaatatggtcttgtaaatgttttaccataattatttctccctaattactatttttataaagtatcctcagcaatcattgtatcgcacatctaaaaaacacaaaaatattgactcatatataatataacaaattaagacttacatgttgctacgttctccttgctttaataaattaaatcatctacatttatatttaatatttattataagcgaggtgtcagtatgttattgaatttattattaatatttatacttatcgttatttgtccgttaattttcaactatactctgacgttaaatttaacatgctacatcttagttgtcatatcgatatttttgtcactcatctatagcatcatgacctatactttcccttggtctatgtttgtaacatttataataatcagtattatcatgctattcaaacatagatatttattttctcatacttctagtcgcttatttattaaaaaattattatctttttcatataaatttgtactctacacatcagcacttctatttataagtacgattcagtcacctattgtgaaaggtttgtctatgtggttagctatattatgtctttccctgttactaacctttatttgttatctcgtttggacagtatcatatagacatagatcatacaacaaagaagttgatatcataattgtgttaggtgctggtatttttaccgaatttgtcacaccaatgcttgcagcgcgtttagaccgtgcacttgatatctatcaacaacaagcatcagcaacaaagatcattgtatctggcggacaaggaccagacgaaccaattcctgaagctttagctatgcaacgttatttgattgcacatggtgttgataaaacagatatactaatggaatctcactctataaatacatacacaaactttttatattctaaacaaatcatcaacaatttgtatcataaagcagttaaaattgtttgtgtaacaagtcagtttcatgtattacgcgccttacgactagcccaaaaattaggtttatctatcgatggtgtcggaagtcatacaccatatcactttttcttacatgtgctcattaaagattatctaggcgtaatgtatcagtatagattgttattaacgttatattgttcaagtagttggtttatatgtctttacgccgcttttatgtataatagttaatccacaaataaactattattataggttgtttctaatattgcgtcaaactatctttaaatattcgttaatccttgattagacaattgttatattgaaaataaatcaaaaccacccgtgtgaacgggtggtttgttctgcggctataagccttccttactggccagccctaaaagggcactgacaagtcagccaactgcactactatttcagcaaccctaaagggttactcttttttctttctttttctatttttctctccagtgaaaggatctaaatattcttccattgagatttggtctgcaacgatatcctcttgtaattgattacgaatataattttcaatcacttttttatttctacctactgtatccacataaaatcctttacaccaaaactttctatttccatatctatactttaagttagcatgtctatcaaatatcattaaactactttttccttttaaatagccaacaaatgatgataccccaagtttaggtggtatacttactaacatatggatatgatctttacatgcctctgcttcaattatctctacaccttttctttcacataattgacgcaatataatccctatatctttttttatttttccatatatcacttgtcttctgtatttaggtgcaaagacaatatgatacttacaattccattttgtatgtgctaaactgtttgtgtcagatgacattaaatagcatctcctcgtgttgattattttggttggctgaccaatatttattctagcacgtagagatgcattttttgtgacaatggtagaaccttttctgaaccatacgcatagcgtatggttttcttttcataaataaactaaagcacgtcatcattttatgtaatggtgacgtgcttttttgtaaacccaaaccgtattctgttatctaacttttatactactatgtcttaaatcattaacatttagcgtctttacaagccactaatcagttatttttccatcttctaattcaatcactcgatctgcatattcaaataatcttcgatcgtgtgtaatcataataccaatcatttgttgttctttaatttgttgacgtatcatctcaacaacttttgttgctctatcggcatctaaacttgctgtgggttcatctgctaaaatgattttcggattattcataaatgctctcataatcgcaacacgttgcttttcaccgccagataactgatgcggatatacattcaagcgatcttctaaaccaatatttttcaaaagttgcattgctctttttgaactttgttgtttggtcattcccgcttcttggcctacgagtgtcaattgctctatcacttttaaataaggaactaaatgtgaagattgaaaaataaaaccaatatcttccaatcgtaaatcactaggacgatgctgtttatcaaacaatggtgcatcattgtaaagcactgtaccactcgtttgacttaacaatccgcctaatatcgttagcaatgttgttttcccagaaccagaggcaccatttaaaatgacaaattccccttgttccacttcaaaattaataccttttaaaacttttgtttcagacaaaccttctccgaaatttttgacgatatcttcaacgactaatgccattattctgcacctccaattgcttcgataggatccactttaaataatttaataaatgatagcgaggcacctaaaatcgctactaatataaatatccccaccatcaatacaatattttgcgttgttaagtaaaaaggcatcgttaccggcatcataaatgatagtcctactatgatgatcacagcaatacctaccccaattattgttagtgttaaaatttgtaaaactaacgtactcaataaatgtcttgtcttaataccaattgctttcaaaatgccaatttgtgatattttttgaatcgttataacatagaaaaatgcacttagaacaattgctgtaatagcaaacaaactaacaatcatcatatttaacggtgcttgctctgcttgataactcgcaatattacctgttaaatctttttcactcacaacttgaacgtcatttattttattaagctcatcacgttgttgttgcgttaaatttttcactggataaaatgccgtattaaccttattcaatgcattaaatccgttatcgttcaatagcacaatggaactatgcgcatacattgtgtcgtttaaaataccagaaactctataactagttgaattatttttaaaatgtaatctatccccgactctaatgttgtctgcagctaacttatcattaatagcgacctcatgagcatttttaggataatcaccttttttaagttgtaagcgttgttgtttaacgtcattcattgtaatcacatcttgttctttgttagataatttcaatgtttgaacattcattttatatggttcttgatgaattacctttttaatttgattctgttgcgtatcactaagttgcgatttctcaatttgcggctctttcattttttgaacaacatattcatcattatcaaagtgttcaaataacgaaatattctccctaccaagcccttgagctaaaccactaataaataacaccataatacttaataaaagaatgattaatgtgattaaaatataacgaaatttgtaaaacataatctcttttatcgctaatttcatatcgattcacttctccctttttcttctttagcgtcagtataaggttgaaatatgaactcaatatgaacaattgtttttttacgcaaaaatattttacatgtataataaatgaaaaagataagggagtttatagctatggtgcaatgtcttgttgtcgatgacgatcctcgaatcctaaattatatagctagccatttacaaacagagcacattgatgcatacacacaaccaagtggtgaagccgcattaaaacttttagaaaaacagcgtgtcgatattgcagtggtagatattatgatggatggtatggacggctttcaattatgtaatacattaaaaaatgattatgatataccagttattatgttaacagcgcgggatgcacttagtgacaaagagcgtgcgtttataagcggtactgacgattatgtaaccaaaccctttgaggttaaggaacttatttttagaattcgtgcggtattacgtcgatataatatcaattcaaattcagaaatgaccattggcaacttaacgctaaaccaatcttatttggaactccaagtatctaataaaacgatgacgttaccgaacaaggaatttcaattactatttatgcttgcagcacgtcctaagcaaatctttactcgtgaacagataatagaaaaaatttggggctatgattatgaaggagatgaacgaacagttgacgttcatattaagcgactacgccaaagattaaaaaaattaaatgccacacttacaattgaaacagtaagaggacaaggctataaggtggagaatcatgtttaaaacactctatgctagaattgcgatttattccattacggttattttatttagtgcattaataagttttgtattaacaaatgtatactatcattataatttaaaaacatctaatgacgcgaaaatcatgaagacgcttaaagaagcaagacaatatgaacaatcggctaaaccaacgcacattcaacaatatttcaaacatttagggcaaatgaattaccaaataatgaccgttgatcaaaaaggtcataagacattttatggggagccttttagagaagatactttatcacaaaatgctattaacaacgtgttaaataataaagattatcatggtattaaagataaaccattcgcattattcgtaactggatttttcgacaatgtaacagataatactgttggtattaactttaagacaaaagacggttcaatagcagtattcatgcgtccagatattggagaaacatttagcgagtttagaacattcttagccgtcttgttaatgttgttattatttatctcgatttcattagttatcgcatcaacctattcaatcattcgtccagtaaaaaagttaaagcttgcgaccgaacgcttaattgatggtgattttgaaacacctatcaaacaaacacgcaaagatgaaattggaacattacagtatcactttaataagatgagagagtcattgggacaagttgatcaaatgaggcagcattttgtacaaaatgtatctcatgaaatcaaaacaccattaacacatattcatcatttattaagcgagttacaacaaacttctgataaaacattacgacaacaatatataaatgatatttataccattacaacgcagctgagcggattaacaactgaattgttgctcttatccgaattagataatcaccaacatttattattcgatgataagattcaagtcgatcaactcattaaagatatcattcgacatgaacaatttgctgctgatgaaaagtcgttaattattttagctgacctagaatcaatcaatttcctaggaaatcaacgtttgttacatcaagcattgagtaatttattaataaatgctattaaatatacagatgttggtggtgccattgacatcgctttgcaacatagtcacaacaacatcattttcacaataagtaatgatggttcaccaataagtccacaatctgaagcacgtttatttgaacgtttttataaagtgagcaaacatgataatagcaatggtttaggtcttgcaattacaaaatccatcattgaattgcatcatggtacaatccaattcacacaaagtaacgagtatgtaaccacctttactattacactgccaaataattcacattaatctctacctcctgaaaaaacatttctgtttttatttcaggaggtaccttttatattgattagcgctttctagccacttaacatttaatttctaccattcaacacattttaaatatatcgatggccgtttatggtttaataattttgaaggaggcattaacctatgatgaaactcaatttatttatcaatgcaaatgagacggaatcttatattgatatacatgcacctaaaatgaatgatcacgttcaaagtattattaatgcagtcaatgatttagacaaatcacatacattagtcggatacatagacaaagaaatccatatcattcatatatcagatgttataacattccaagttattaataaaaatgtaacagccattacaagcaatcaaaaattcaaactaaaattacgactttatgaactagaaaaacaattaccacaacatttcattcgcatttccaaatcagaaatcgtcaacaagtattgcattgaaaaattattattagagccaaatggacttatacgtatgtatcttaaagatgcacactacacctattcttctagacgttatttaaaatctataaaggagcgcttatcaatatgaaaaatttgaaaaactcattattcattagcttaatcattggtttgaccctttcactgttctttagtatgttatttgcagacggcaaatattatccactgaacccacaatcaactattggcatattgtattatacgcatttcacagaaactaccgtaatgttgatttctatcattttatggttactcataggcgtcgtctttttccttggagattttatctttaaatacacagattggggcattactaaagcaactatagtgcatttcataacaacgtatgtcggattcttacctttagcaatacttgccggttggtttccactaacaataaattacctaatcatatttacaattatctttgttgtggtttacacattgatttggattattcaattctttagaaacaagaactacgtagacactattaacgagcaactgaaacaattaaaatgattttttattaaaattataaaagctatacattgcattaaagtagtctcttctgcaatgtatagctttatgtcgtatttattttaaatacgcatgaactgaataatatgttttgactaatctcaacttgaattgtaactgcaactgtactttacgacatcaacttatcatgataaaaacctaacgaaatgcattttcaaatattttattcataatttctgctacttctttaggactctctttatatcctcgtttgacccaatcttgtaacacaccaatgattgcattactcataaaaataagtaaaaaatacttttccttcgtcgttaacatttttgtatttaatactggtacaacattaatttcgatacgttgttgtagtgatttttttatgacttgatgtaatttataagcactctcatcacctaataacattaaaatgagctgaccttcgcttagccaaaaataaattatcttttttaaaaatattgcttgtgtcagagtttcacttttaagaaatttcttttttgcttcttttaacaatgtattaagatagctgtatataaaatcatctttagttttgtaatgtgtataaaaggttgtccgacttatttgactcttttcacatatatctttaacagttatatcattatatgccttcgtttttaatagatttatcattccatcatgtatgcgatttatcgttttcgttacacgactatccgtaaaagctgtttgatccatatgccccaccttttttctgaacattaaaagaaaatatgttcactatctattaatattttattcgcaatcttaatatacgcttaagatgatatataaataaagtgaaatgtatctcaatttaggaggggttgtcatggacgcaactatcgcgaagttagataaagttgtaaaaacgtataacaagcatcacgtattaaacgaaattagtatgtcaatcaataaaggtgaactgctagggttaataggtcctagtggttctggtaaaacaacaacaataaagtgtttactaggtatggaaaagatagattctggatctgcagaaattttcgctcataagatgcctaatcgcaaagctttaaatcggttaggctatatggggcaaactgatgcattatacgaaaacttaactgcttatgaaaacctagagttttacggtcgtttgtcaggactgaaaggaaatgtattaaaagataatattgaaaaacatatcgttctagtgaatttagagcaagcgttaaataaaaaagttgcacagttttcaggagggatgaaacgccgattatctttagcaataacattgttggcagaaccggaattaatcatattagatgaaccaactgtaggcattgaccctaaattgcgccaacaaatatggcaacaattcaagcaaatgacccaaaacggaaagagtgtcgtcatcacaacacatgttatggatgaggcggaacgttgcgataaagttggacttattgtcgacggaagaatatttgctatagatacgccaaccaatttaaaacaaagatttaatgtagatacaattgaagcagtatttattaaagctgaggaggttcgtcaatcatgaaaattttagctattgttagacgagtattaaaagaaatgttacgtgataaacgtacacttgcgctaatgtttctagcaccaattttaatattgacgcttatgtattttatttttaacggtgatgaaaacgatataaaaatcggtatcgatacatctgtttcatcaaatataacaaaacaattgccatcatccgacataaaaactcaaacgttccattctcatgaaaatatcaaatctaaaatcgagaataatcatcttgatggttatatttaccaagaaaatcaaacattgcatgtcatttatacaaatgaagaccctaacaaatctaatataatcaaacaaatgattggcaaagctatacaacaagataaaataagcagtataaagcatctaattgaaaaagcacctccgaccatgaaagcaccaaacaaacaagatattaagatttcacattcctatttatacggtaattctgatagtacttatttcgataaaatgtttccaatactaatgggcttctttgtatttttatttgtatttctaatatcaggtatagccttattacgtgaacgtacaacaggtacgttagaacgtgtattatcaacttcaattcgtcgaagtgaaatcgtccttggttatctgattggctatggtatattcgcaatcattcaaacattaattatagtcctattttcaatatatttattgaacattaatttagcaggtagcttatggtatgtaattttgattaatatttgtttagctattacagcattatctatgggaattttcatttcaacgtttgctaattctgagtttcaaatgattcaatttattccactagttgctgtacctcaggtattcttttcaggaattttcccacttgaaaatatgcctgattggctaggtaacattggctatatcttccctctcagatatgctggtgatgctttaaccaatgttatgattaaggggcaaggttggagtaatatatggttcgatttactaattctaatgatttttatcatggcctttattatcttaaatattgttggtttaaaacgatacagacaggtataaattctccaaaacttttaaatgacttcaatcaagataagcttctaaatataaagcactgataataaaaacaaccactcaaaaacggtaatgtctatcacattaaaaagacattaccgttttgtttattatttaacttgtaaatacttagttacttcttcattaattttgtgatataaatcctcatgatctgttaaacgataaccaaatgacggcaccatttctttaatcttgggttcccatcctttgaattcatcacgatagcatcgctgtaaaacatcaaacataatatctacagctgttgacgcaccaggtgatgcaccaagtaatgcagctaatgtgccatcatctgacgtaatgacttcggtaccaaattgtaagttacctttagattcctcagtatccttgattacttggacacgttgccctgctgtaatcacttcccaatcttcatttttagcatttgggaaaaagactcttaaatcatccatacgctcatcattagataacatcaattgtgacactaaatacttcgtaagactcatttctttgatacctgcagataacatcgtcacgatattatttggcttaaccgatttaattaaatccatatgtgaaccagtttttaaaaatttaggtgagaaacctgcaaatggaccaaataacaatgaacgcttgccgtctacaaagcgtgtatctaagtgcggcactgacattggtggcgcacccactgctgcttttccgtatactttagcatgatgacgatcaatcacttcttgatttgtacagcgcaggaataatccacttactgggaaaccaccaatatgttttgattgtttaattccagtcttttggagtaatggtaaactcgcaccgccagcaccaataaatacaaaatcagattcatatgttgtcgtttcgtttgtttctaaatctttaactttaactagccatgccccagatttctgtttcttgatgtctaatacattctgcttatattgaattcccacaccacgttgttctaaattatcaaataactttgcagttaacgcaccaaaattaacatctgtgccagtttcatcataagttaaagcaattggttcatcagacttacgaccttcaatcattaacggtacccaagatttcatttcttcttcatcttgcgataatttcattttttcgaataaaacacttttctttaacgttgcaacacgactttttataaaagctacattatcttcgccaatgacgaaactcatgtgtggcaccgcttgaataaagcgatctgggttatctaattgtcctgttttaactaaatatgcccaaaactgctttgaaatttggtactgctcatttatcttaattgctttactacaatcaactatgccatccttaccttcttttgtatagttcaactcgcaaagtgctgaatgccctgtaccggcattattccatacatttgaactctcttcgccaggttgtgataatttttcaaacactttaatatttttctcaggtgataattctttaagtaatgttcctaatgttgcactcataataccgccaccaattaagatgacatctgttttgctatgttgtgttgtcataacaaatacagtccccctttttaaaatgaataatggaacgttcgagaaatacgacatattaataccactttgaatcaataagtgtctcaataggttcccatggtgatgctctattactatctgctatgtatattaatattttataataacgaaactactttaattatatactttatgtgcgatagcacaaagacaaaaccacgaaccttaacagctatcaaccaatttaacttgattgatgattactcactcttcattttaacataaagcgctaccattattataatgtcaaacttctttcattaatgatccattaaaaaagatgagatgttagaaaacatctcaccctctgtatatttatattttgaaatacgtttatttatagtaatgacaagatgaaagtccaaatacagatgaatattagtaaacatacactgtatttcaatgtcatttttaataattctgattccttaccaacttgttttactgctgcagttgcaattgcaattgattgtggtgaaatcagttttgccgctacaccaccaactgtattagcagatacaagaagtgaaccacttgttccaatttgttgtgcaacagaagcttgaattggtgcaaataatgagttgttatttacaactgatcctgtcataaacacacctatccaacctaagattggtgatagaactgggaagacattacctgctttagcaataccttgacccattgctgcacttaaaccaccataagttgtgattttagaaattgctaagatgaaacaaattgtaagaactggtaaccataattctttaaatgtaacaccgaataatctacctgcatctttaaagttaacctttttagacattaaaattgtaataataatagttaataaaatagctgtacctgtttgtccaataatatttaaagtcaatactaatggtttatgcgtaacttcgctgactgttccaggtaagttgaatttaaatactaatgatgataaagcaccatttggtaagaataagtttttaaagaatggcgcactccaaatcattacaatgactgttaatacaatgaacggactccacgcatgtaatactgcttttgcagaatgtgcttttgcaggttcaatttcttcatctttattaacacgataaatgtgttttggttggaattttttagaaaatactgctaatgctaacattgttaataacggtggaataatatctgctaattcaggtccactgaatacagttaataatccttgagtaagtgtataagtgattgaaactactaaaattgctggtaatgtttctttaacacctctaaaaccatcaataataaagataagtaagaatggaataatgaaatttatgattgccaatgttaaagttgctgattgagaaacacctaatactgaaacatctccaggtaatttcaacgtttctacaacacctacagggataccaatcgcaccaaaagcaccagacgctgcatttgcgactaaacataacatcgcagcttttaatggattaaatcctaattgtgttaataaaagtgcacaaattgcaattggtacaccaaatcctgctgcaccttctaaaaatgcgttgaatgcaaatccaataagtaaaacttgaatacgttggtcttgtgaaatatttgtaatactatcttgaattgttaaaaattgtccagattcaacagtaattttgtataacaatactgccatcataacgatatagccaatcggaatgataccttggaagaaaccttcgactactgcaccagaagcgataccaactggcaatttgaaaaatggtattgcaattagtaatgttacaacaagtgttgtaatggctgcataaatacctttcattttaaaaacagttaaacaaagtaaaaacagtacaatcggtattgctgcaattaaagacgataataataaattatcaaatgggttaaacgtatttactaacataggctgactcttctttccataaagtagtagtgtaattgcttcattaaaatcatgctctggctatagcattttgttatcgataacattttacagaacagtgagattaatgtgatttttttcacaattaaaatataccattttttcagactattaacaatatcactttcctatttaattgttttatttttcattttaaatctgttcatcaaaatgaattgtacttaatgtaatgaagtaacttatactattcatgaattttacataagaccgtgctaaaataaggaagatactacgatgagaaatggaagttatagcaatgattaaacagataaatgtttctaatatgcaaaagtttgaatctcaattaatgaaagctcagtctgaaggttatacacatgtagttccatatgccaatgagataatgatttatcaatctatgttagatgcggttcaattatatcctaagtctatcgtggttgattatactgttgatggacaatacaaaaatgattgtcactatttcggtcaatcatcgatcaacattgccgattgggctcaaaacaataattattatcctaacctgatatatgcgattcaacagactcttgatttaatacattattactctgtagaaacgattttcgatttagctttattgacacttctgaaaggtgatttatcaatcgatggtcatgtcgtttttgattttaaagcccctttagcaacaagtgcttcaatatgggaaactattaaaactattgaagattttgatatgatgtctcagttttatttgaataaaatggcttatattgatcatcatcctataccttttcgcaacctttttatcgaggattcagaacaactaaattcgccagataattggttgtattctaccaagtttatgctacctaaatggttatataaaatagcaaagcaacgtgctgataacaaacaattacaaaacttcggcttgtatacgaagcaaccaaacgttttaaaagatcacatcgtttttatcggtgatcatcatcaatatataggtaattcaaaatatttatttacttacttcgttaaacataatccaatgactgcctgttattttgttactgacgatcgtcgcggaccacatttcatatcacctaagtctgaaaaagctgacgaattgattaacagcgcacgcgtagttttagttgaaaatgatatacctgaaacgttacaaccaaacggtactttaattcaattacatcaaggcacaccaataatgcaattatttttagatagtaaagagcctattaaaaatatagaaacacctttttatcgtgctaaaaggtataatcgctggttgcaattcgattatgttatacattctgctgatgatattagccacttttatcaaacggcttttcctagtcaccaagcaaatgtattggcttatggtaatcctaaacaccaatatttactacaaaagcgtaacgaaagtactactcaacaacagtataagaaatcgtttaaaataaatgatcaaaaaccagttttattatacgcacctattggattagtgagtgcgcaacaattaccactatcagatgctttattcaaagcctatcatgttgtggttcagggtgttgatgaaacgatgttaccagaagaggcgcttgttgcaccaaagtatcttagtgctcaagacttaattctaatgtctgatgtcgttatcactgattactcaaatataatatttgatgcgatggctatagacaaaacagtagcattatacactccaaatcacagtcaatatattgagtctcaaggtgttaacgaagatatttggcgtcatctatcaaaaatttggtatacagaccgacaattattaattaataatttaatttcccaggcaataccagtgattaaatatccacaaatacaacataaagaacaaccattagaatctatttcacaacttatattgtctaagatgacatctaatcaatagtgtttaaattcctcagtggctgtgaatgaggtttaaaagtactatagaacgtaaacttttatactttaaaatacgcaaaaaaacggtaaaccctaattcatattatagagtttaccgttttatttttttaacttacatcatagttatattaacattattgttggtagtttggatcagtaaccattgcttgtccagtataatcaaccgttacaattgaatattttccatttgcatttgggtctttaaaactaaacacatacttatagttgccattatgttcttcaatagaataatcattatacactttattattactaccaaatttatttgcttcattattagccgcatttaaagctgtttggaaatttggcaattgctgtaaagcttgagttttatttccattaaacggataaatttgacgtgcaaccggcgcggcattttgtccataatatggtgcaacgtaacttgatttttgattattattcgcttgattattattcgcttgattattacttgattggttattatttgtttggttttggtcattgtttgttgcatttgaattagattgttgctggttatcgtttgcactattatctttattatctttgtttacgtctttactatcatctttattgtctttcttatctttagatgaatcatttgtttttttatcttgttgttcagttttcgctttatcatctttttctttattactgtctttttgttggtcactatcttgaccacatgcagctaaaaataatgataatgctagtaaccctgtaactaatcttttcatacatatctcctcctataattcgatattcattgaataagcttgaaatacatatctaccatgtgtatcatttcatggcttgttaccaaagacgtcaacattaatatgatttgaattatcacaatacccataactacaatctaaggttctttttattataccctaatttttgttcattattatttaatttttgtgaattttatgttttctataaatttaattattttactttaacaattcattacgcatttagcatttcaaggtatacacaatatttattactatgatttcattttatctgctgcaaaaacaatcattataactctttttccataattaaatctgtatccgttacatcacctgtttgaaaatgatgttcaccaaccactttaaatccatgacgtttataaaatgcttgagcacgaggattatgctcccaaactcctagccaaattttatgtttattatgttcttgtgcaactttttcggccaattctatcaattgtgaacctcttccgccaccttgaaagtctttcaaaaaatatatgcgctgcacttctaaataagtctcccccatttcttcagtttgagcactattaatattcatctttatataaccaacattcgcaccatcttcttgataaaaataatgaaatgaatctacatggttaatctcttgtgtaaatttttctacagtataattgtctttaaaaaattgatcaaaatctttgtcatcatagtaagaaccaaacgtgtcataaaatgttctagttgctaattcaactaattcactagcatcttgttttgaaatttctttgattataccagccatataaatcctccaataaacagtgatcgaatcaaaatattacttatgttatttttcagccaaaactatttaaaaatacattaacacaaatcaattataaattgtattgattgtgtgtaacatcaataaatgatacatttattccagtaaaatggccgtactttcaaaagagaaaaagagaggatgtatcgttgtgatagaaacatttaaagcgtttgtaattgataaagatgagagcggtaaagtgacaccaactttcaaacaattatcgcctactgatttacctaaaggagatgtgctgattaaagtacattactctggtataaattataaagatgctttagcgactcaagatcataatgcagtcgtaaaatcgtatcctatgattccaggaatagatttagctggaacaattgttgaatccgaagcaccaggttttgaaaaaggagaacaagtaattgtaacgagttatgacctaggtgttagccattatggcggttttagtgaatatgcgcgtgtaaaatcagaatggattatcaagcttcctgatactttaacattagaagaatcaatgatatatggcacagctggttatactgccggtttagcaattgaaagacttgaaaaagttggaatgaatattgaagatggtcctgtactcgttcgcggtgcttcaggtggtgtcggtactttagcagtactcatgcttaatgaacttggttataaagttatcgcaagtacaggtaaacaagatgttagcgatcaattacttgaacttggtgccaaagaagttatcgatcgacttcctgttgaagatgatcataaaaagccactcgcatcatcaacttggcaagcttgtgtagaccctgttggtggcgaaggtattaattatgttacaaagcgtttaaatcatagtggatcaattgcagttattggtatgactgctggtaatacttatactaattctgtattccctcacattttaagaggtgtaaacattttaggaattgactcagtatttactgctatgaaattaagacagcgcgtttggcgtcgtctcgcaaaagatttaaagcctgaaaatttacatgagatcaagcaagttattacatttgatgaacttccagaacaacttaacaaagtaattaaacatgaaaataaaggccgcattgttatcgatttcggtgtagataaatagtattcatgaaaaagacatcccgttatgcgagatgtcttttttaatttagtatttgatatacataccgcctgaatctggttcggtaggcataaatccaaattttgcatataatttatccgctgggtagtctgcgatcagactaacgtatgcactttcgacagatacatttttaatatacttcataatatgttccataatttgactgccgtacccttgaccttggtaacttttcaaaactgcaatatcaacaatttgaaaaacagttcctccatcgccaatcactctacccataccaattaaccgatctttatcatacaaggttactgtaaataaggcattaggtaatcctttttcagctgcttcgcgcgtctttggactcatacctgcattaatccttaatgcgcaataatcctcgcaagtcggaatatcatatgtcactttaaccattatttaccccacttttcatcacacaatatataaacctagtataaatgtttatttacaatagtcttattcgcttctttaaacacttcatgatgacttgaaacataaccttctgcattcgcatctggttggatatatgttttagcaaggttcgctgcatttgcaccatcactaaatgcacttgcaattagatgtgattttgcatcatgataaacaatatctccacacgcatagataccaggtatacttgttgtcgtattaccaaatcctttaacacgacaatcatcatgcatatctagctttgaagatgtttcactcaataatgtattacaacgatcaaaaccatggctaataatgacatcgtcaaatttaactgtatgcgtatcaccactttcaacatgttccaaaacaacttcacttatatgcgtttcatcatcattgccgaccaagtatttaatacgtgttttcgggcatagtttcacatttaaatctgtcaccagcgttttcatcgcttcatgaccacttacatcttcttttcgataaacaactgtcacgcttttagcaatcttggcaatatcatgcgcccaatctaatgctgtatttcctccacctgatattaatacatctttatctttgaaacgtctgtaactttgtacaacataatgtaaattagttaattgatatctctctacacctttaacatctaattgttttggattaataatacccgcaccaattgcaatgataactgctttcgatgtatatatttttcccgcttctgtttcaacttcgaaatgacgttctgcctttttcctaatatctaccacacgttcattcaaatgaacttccggtttaaaatataatccttgcttaattgtatcttttaaaatttcatgacaaggttttggcgcaatgccgccaatatcccaaataattttttcagggtaaattctcatcttaccccctaattcagattgaacatctatcaatcttacagacatatctcgcaatccagcataaaagcttgcatacaaaccagacggaccgccaccaatgattgtaacgtctttcattatgtgcctcctatgactctctatattcatttctttcattaacgcgctcaaattgataattattatcatttaaagacattatactattaatatttatattgttaaaataaatcgcatagttagccatgaattatcaataactatcccatcacaatataaaaacacacctttcaaagtacgaaacaacaatgttcctttgaaagatgtgtatattttttagttctagttatattattttttaaaagactcatcacgtggttctttaagaattgcttgtcttaaaaggaaaaatagcaacaataaacctgcaagcatacctgtgtgcccaatacctgcaaagcctgcaaatgcttctggagagtatgatttaccagtgacttggaagaatccttttgtcaccatcatacctatagtaacgataacacctatgttatatacatagaagaaccagttaaataagtagtaacttgataatttaaataacttctccaatggtaataaaattaaaaacataaacatacctaaaataagtgtatgtgtgtgtacaagtgataattgtgttgtaccagtaaaatcatatgcttttgttagctctctatagaaaaagccactaaataaacctatgatcatataaaaaagaaatgaatataataacctacgcattttgaatcctccctcaccttttcattatatccgattataccgattataacagtgacaaaaaagcgaagatatgacacaactgaatttggtttagcacatagtatgacagctaaaataactttacatcaagcgctatacaaataaaatagctataccatgacgctcgctacaaacgtcttgtatagctatatttctatttattaaattatgacggcacttcagtacgttttgtgctatgttttctaacaatagctgaaactaaacttgatacagccccaaaaatcataaaccctataaacatccacattgtactatttaattcaatatgatgattcaagtacaatagttctcttacacttgttgcatagtgtgtgaatggattccaatcatatacatatttttgataactttcaggcaacatttgtttaggtaacgttacaagttgcatactaaagaacattaaaatgaagaaaattggaattgacttcatacctagccataccataacacctaaaataaggcccacgaaaccaagaatcgcaagtgctacaaaaattgcgatacgatttggatggtcaaaatcaaatccttgaacgccttgcatgaaataaatataaacaaagctacctgcaaatgctgcaacaactgcaaatatcatttgtccaattgaagcaatgatacgatgttgcacgacgatattgttactagttctaaatgcaaagaacaataagatagacgttacgattgaacctatccaaattggcataaacattaggaatggtgcattaccacctgcttggtgatctttaactttattaagtttttcattatccacttttactggattcgtcaaaccattgatgtctgcggcattgactttaacattttgactcgttaatgtttccaaactttgcttcgtaatttgagcattaatattatcacccataccagttaacacagccgatgcaatttgtgaaccttgtaagcttgatccttcacttacaatcgttttaaatttagcctgcttaacctctacttgttgattccccattttttgtttcatttgttgaactacttgtggtggaatttcacctgaagcaactttttgttgcatttcttcttttttactatccataactactttttgtgttttactcatagcatcttttgaaaagtctttatcaataatagctactccaaagattttttgatctttcaaatctttttcaaggtctttttcactatcaaccttaacccatttaattttattagaatcactatctaataatttatcctctaattttttaccaatgttaacatttttatcttgaatcgttgtacctttatcctcatttaatataccaattggtaaatcttttggttgaggattatatgcaggataaaaagctaaagaaaagattaccaagataatcatagttgctattggtgcaatccataataatttatttttaaatatattcattttattaattacctccttattagacaatgtgttgaatatttcgcatgttgtctattataatatgtaagtgggaataaacaatacacaatgttcatcaatacgtttattaatagacaaatacacccacattgttcaataacacaaggaggttgatttatttttgaaagaagataggcgaattagaaagacaaagtcctccattaaacaagcgttcactaaattactacaagaaaaagatttagaaaagattaccattcgcgacataacaacacgcgctgatatcaatagagggacattttacttacattacgaggataaatatatgttactcgcagatatggaagatgaatatatttcagaactaacgacatatactcaatttgatttgttacgcggttcttcaattgaagacattgcgaatacttttgtaaataatatacttaaaaatattttccagcatattcatgataatttagagttttatcatactattttacaattggaacgcacgagtcaattagaattaaaaatcaacgaacatattaaaaataatatgcaacgttatattagtatcaatcattctatcggaggcattccagagatgtatttttacagttacgtttccggagcaacaatttcaattattaaatactgggtaatggacaaacagcccatttcagttgatgaattagctaaacatgtgcataatattgtttttaatggtccattaagaataatggcagaaaaccgcttgcataaatcaaaccttgattcactaacttaagtaatactcgcttttcctaaatcctttagaaaggaactatatatcatgattacttcattcagacattctgaagatatagataaacatattataaaaacaccattagatcacacagcgtcatggattaatgtagtagaaccagaccgagaagaaattgaaaatcttatggaacaatataatatacctgaagactttatacgtgaccctttggactcagaagaaagttcccgtattgaatatgacgaagatactggttactcattaatcattattgatttacctatcgtcaattcaactaatcgtagcgttctatcttttgtaacgattccattaggtattattattggcaacggtattatcgtaacagtttgtgacgctgaaaatgaatttttagaaaatttacctaagcgtgatattaatttaaaatttcacagcagatttgcattagaaattttaactactattgccgaccattataatcgtaacttacgattacttaataaaagtagaattcgtattgagaaagaactaaaaaataacattactaacaaacaacttttcaaattaatggaagttgaaaaaagtttagtatactttttagctgccttaaaaggtaacgatacaattattaaaaagttattccgtttacctgcaattaaacgttttgaagaagatgaagaattactagaagatttaatcattgaaaataaccaagccatcgaaacaacagaattacatcaacgtatcttagaaagtatcacaacatcatacgcttccttattatctaatgatatgaatacgattatgaagacattaacacttttcacggtactattaacgttaccaacgctcgtatttagtttcttcggtatgaatgtgccgttgccaattgatgaccatagttatatatcttggattattgtggtaggtatttcattaattcttgtcgtaattgttagtattttcttatggcgaaaacagaaattataactaaattaaaaggtatgacagcttaaagtttcatcctattgcatttgcagtgactgatactttgattactgtcatacctcttttttattctacaacttctttatttgcttttcttttcgataaaattaaagtaactgttatggcaacgatgaatgatattgtcataccaacaaagtagtgtaaccatcctgcatgtactggattgattgaaataaatccaggcaatccagcagttcctaatgcgattgctttaaccttgaagaaagcaatatatgctgaaccaatacctgatccaacgatagcaccaataaatggatatcttagttttaagttaacaccaaacatagccggttctgtaataccaagtaatgctgaaatacctgcggcagatgccacaccttttaactttttattttgtttaataataaagaacgctgcaattgctgcaccaccttgtgcaacattagacattgtcgcaatcgggaatataaatgatccacccgttttagtggcatctgcaattaatgtcgtttctacagctataaagctatgatgcatacctgtaataacaatcggagcatataataatccgaatattaatccaccaattgcaccaccaaattcataaagccatgttaaaccatctgataaccagtaacctaattgtcgagtgattggacctacaaatgaaaatgttagaaatgctgttataaaaatagataacaatggtgttaacaaattatctaacaccgttggaataactttgcgtaaccctttttcaattgaggctaagatataagctgctacaagcataggtaacacttgtccttgataacctacttgattaatatgcagaccaaaaacatcccaatatggaatagccttacctgcttcaactgcttttggtaaatcgtatgcgctcattagcgatggatgaaccagtatcatacctaatgcagcacctaaaaacggattgccaccaaaacgttttgctgcactaaatccaattaaaattggtaataatgtaaatggtgcattcgcaaaaacatttatcatttcagctaatccagcaaattgactatatacatctatcaatgatttacctgaaaagaataaatctttcgcagtcaaaatgttatttaaccccattaataaaccaccagcaacgatggctggtataatcggaacaaagatatctgaaagcatttttacaaatcgctgtaacggattcatatttttagcagattgtgctttgacttccgaagtggttgatgcttcttttccagttaatttttccagttcactaaatactttattgactgtaccagacccaataataatttggtattgtcccccagtagaaaatgtccctttaactacatccatattgtttagcgcctcttcatttactaaactttcatcatttaaaactaatcgtagtctcgttgcacaatgcgccattgcatctaaattctcttctccgcctatcgcgttcaaaatatcttctgcggattgcttataattcatatatttagcctcctaattagaaccggttccatttattccattttattgtaaccggttccaaaaatatttgcaacactctattatcattttatataaacacttacatcacttttgatagcgcattcatttttattgctatactacatgcatgtatattaacattaattatcggaggtaattttatgaaagagcgtggccatatcgaacagctttggcgtgaggaaaaatatcatgtattgttacacagtcaacaatcttaccaaatgataaggaatgctttaaaaacggatttatcacttcatcaagtccaacaaatgattgatgatgctttgttaattgaaccaagtataggaagtgtatgtaatgcttttgatcatatgtggggatattttaaaaaatgtgcgaatgaagaagaaagacaacaatcaaaattacttaaagctgattttattaatggtaaaatcgacacccaaactttattagattttttagcagaacttgctaataaatatgatgttcaatatttactacaaagtcgtgttttaaacacaaaaagaaagagatagattgaaactttagttgtaacggacaaatagtagtcattggagttcagcaattcatactttgtactaaagtttactataatctatctctcaaggtttaaatgtacatatctatattaaaatgcgtttcttgatgttagaagataccatacacatttaattagttacagcataaatcaatttatacccttaattattacattgtttatattttaaattcgggggagtaattttaagtaatatcttgttgctgctaattctattgttaataaattgatattagatgtagaaattgagtgtgaaagttaataatagatgatttagctagtaacataattaattcatatatagtcaaaaagttctgttagatactgttcttgatgaatattctttgatgttaggtgttagctattctagatgagtttcttagatgtggatgcctgtcttgatgaagttatctatgatgttaatataatacttgatgttgattcttagatgttagtgcgatttcaagatgctgattctttgttgttgcactatcttggtgacgtttctagttgtttatagttatcgcatctcttgatgtaaaatctaagatgtttatgcatttctagatgttaattcttcgctgcttaagaattatcttgatggtaaatctagttgtgccatgcattttctcatgatgaatctaaggtgttaattcattgatgtgtgctgtttcttgttgcttcattatcttgatggtgaatttcgctgtctaatgcactttttcaaatgattattctaattgttacggcaataactagatggattttcttagatgttcacttttctagatgtttatacttatcttgatgttttctaaacagaacttttaaacgctttattttttagtggattgtttaaaatttcttagttgatggttattgttgttgatttgaataatttgtagcgaatattttgtaacagggctactaagaatttttataacaagaagtgatttcaatcgtactaattttcagcgtttgatgacaaaagtgtatgtccaaacttaaataatggcgataaaatttaagtcatgggtacatttaatgttttttgattcaaacttccattttggtcaatttgctttttttataacatagttgaatatcaataaaagattagcaagttagttcaaaatggctatgtattgttttttgaaatacataggtttgaaatctatattaattatgcaccaaataatttaattagactctatcgaaaatttccaaattttgcttactatctttctaattttacttttatattgtgcacaatgcataaaaacaagcgttttcctaggagttttcattaatttcttttatttttcactattaccttttcaaaaatattcaactataataggtatactatccatgattttaaaaatttccatgttttacatttaaatgatagatttcaatatatattaggcaggagagagaaatatgacatgccaacttaaaatacatcatacattatcgacaataccaagtcgtaatattaataatattatggtgctattttcacttacaagtaaactcaatattacgattaatggtgaaaccaaagacgtaagtaattatattatcttaattaatcacggtgatatttataatattaaccacggcgaaaatataatcgaattaatgatacccgttttttatttttatcaacaagatgataatttctttaatggttatttagatcgtcatttattacaatcaagtaattatattaagtcattaattgccgatttaatcagtacaccaacaagttcttctttaatggggaaaattataggtcaaagtattatagacactttacttaaagaagcttttataagaatcgatcatgaatatttaccaaatatcgctttaagcaatccggtgtttatagactgtgtaaactatattcatgacaatattgatgcgcacttatctttaaaagatatagcgatgcattgcaacatctctgaatcatattgttctaatctttttgttcgatatctgagtatgaattttaaagattattttacaagcattaaacttgttaacgccatcaatttattactttctacaaaacattctattacaactgtttctgaattggctggttttaacagtcatacaaattttgcaaatcaatttaagaattacttgcattttagtcctaaacagttccgttcactcgtttccaagattactgaaccaccacaaatacacttccaacaagataacgtatcacaattcactgagttaatttcaacaattgatttaacagctcaactggctacaaatacaacagatattcatatagatgattttaatccgaaagatcgaagtcagcgtgccaaagtatttgttcgatttagtaatttcaatgaactatttcaatttattttcaatgaatattacgatattaactttgagcacttaccaaaacctgtcgttttcattgatgatattcacgatattgagattagccaaacgaattacaacctgttaaatagatgttttgaaaagcttttcgaaaaaaatataggtttagcaatcgctattaaatcaacacaacaattcgaaacgatgaagcaattaatactaacatttttacaaggtaatcaagactataagacaagcaagaaattagttaaatttatgctcgtattttgctctaattctatgacagcagaagaaattcatttatgtcatcttaaaattaaaaacaaaaataaagaaattaaatatagtgtgacagtcgatggctttttagaaacttattcaaccgtggaacaagtttatgatgtcatgcagcgtcttaaattccattattactttattgatattgaaaattcaaaaactgcaacacatcttatcactaaaaaccaacactatcatcaaactgacactcattttgaacagtataagaaattcattttagattcaggtatatcatcaacacaattcgtatataataacctgtctgtaagcggatttaaatatactaatgatggtaagaatccaattcaattatctgacatagtgtatcacttaatcgcattattacgatatggcggtggcattagctatcaattattagatgaccattcaaattatatttccttgtacaacaaatatggtagccccctaccattaatgcatttatataaaatgtttagaccttttgttaatgaagacattgaaattacaaataattatgtattgagtcgtaaagataataactaccatttcttattattcaataaaattaatgaccgatatatgtcagacgtaaaacaagacttcattttccataatgaattacctcaagattctttgatgattattaaaactttgaatcatgaacatggttcaattcaacatttgcttccaacaagcgatcaacttgtctatatagaaaaagaaattctagatgaattagacaaaacgaattaccctaaaacggagcttgcagttcaagaagaaactggtcgtacatttgaactcaagttaaatcacgacgaggttaaatatatttgctttaaacctagctaaatactaacagtcctcttgtgtttagtttcttacgataaaggctatttatatcataaggagatgatataggatgagtaactcacaagcaattcaagcaattgaaaacgtgttagcaacgtcaaaagttggtgtattatcaactgcatataataacaaacctaatagtagatatatggtcttttataatgatggtcttactttatatactaaaacgaatatccattctgctaaggtcaaagaaattaaagataatccagcagcatatgttttgttaggctataacgacacaactaatcgtagtttcgttgagatggaagcgacaatcgaaatcgttacagaacaagaagtgattgattggctatgggaaacacaagacaaaagctttttcagttcaaaagaagacccagagttatgtgttttaagagtagttccgcaatccattaagctaatgaatgataaatcattagaaacacctattaaaattgatttataatatgtaagtttttagttttaaaaattagccagcaattgaacatgttagctataaatttcaacagtatcctatttatatatatttcgcttttgaaagcgtttaatacttttaactatatttttattatataacaatattttagacacattttattcacatttattgtgattaaggtgtgtctttttaaattaattttatgtaatataaatactgcatttgcaaactgttgtacttttaggtataacagaattaactacatttaaggagattgatgaaccgtgaaaaataaaaaaggttttggtcttggtattagtttaattgccatcatgttgattgtatgtattgtactagtaatcatgatgatgactggtggaaagaaagatacatattatggaattatgaaagacaatgctacaattgaaaaaatgattagtgaaaaagatgaaagcattgagaaaaacgttaaattaccttcagatgcagacgtttcagttaaaaaaggtgattttgtaattgtttataaattagcagattctgataaaattgttaaagtaaaaaaagttgatcatgacgatgtaccacatggtttaatgatgaaaattcatgacatgggcaaaatgcacatgaaacactaattaagctttaattttgagtaatatataagatattaaaagcagcagtaagatgttttctaattgaaaattatcttactgctgctttttaagaattactgtgtcaatctatttccggttcgcctgcgctttgcgcatgcataaaagcccctaacaaccagaggtcccttcgtttcggttcgcctgcgctttgcgcatgcataaaagcccctaacaaccgagaggtcccttcgctctcagttcgcctgcgctttgcgcatgcataaaagcccctaacaaccagaggtcccttcgtttcggttcgcctgcgctttgcgcatgcataaaacaggctgggacataaagttcttaggcaatgtaaaaaagctgtatttctattaattatttgatagaaatcagctttttttaaaattgtatttgataatatacagctcgtcgagctagctattttccttatattaagtgccattaatacaaaacctagctctcgtttaactttatttattcctcgaactgacattcgagtgaaacccaaaatagccttcataaatccaaaaacaggctctacatcaatttttctttgactatagatttttttcgtttctggttcagaaagctttttgattaatttgggctttaaagtattcccaattataattcttcatgatttttcttattggatttcgaatttggcttcatgcattgttgcctcaaagaacatgctgaacagtcatcgcattcatatagcttgaagtcacgtttaaaaccatatctatcattacggtatgcatatcttttaaaacctattcttttgttattaggacatataaattcatcattaagttcgtcatatttccaattttgagtgttaaaaatgtcacttttaaactttctagttttatctttaataaacatgccatacgtaataagtggcgttttattaaaatcatctataatagccatatagttttgctcactaccataacctgcatcagctacaatatactcaggtaaataaccgaaggtattttgaatcattgttaaaaatggaattaaagttctagtatctgtcgggttttgaaataggtcataggataaaacaaattgagaatttgtcgctatttgtaaattgtatcctggcttaagttggccatttttcatatggtcttccttcattctcataaaagttgcatcatgatcagttttagaaaagctatttctatctttaagaatcgatttttgttcttcatatttactttttctttcggaataatcatcaaatttctttttgaacttcttaatctcagttctttttttacgggtctgttttctaatttgagtacaatcttcgttctcaatagaatgatttaaatcttcgatttctttatctaaatgactaccaattaaatctatttcttctattgttaaatcgctatctccatcttcttttatctctggtattattttttcttcaactaattcacgatataatgcttttgaattttcgttcaatttcgattcgtgattttgaatacttttcttccacacaaatgtatatctattggcactagcttctacttttgtaccatcaataaaaattgaattatcatcaataagattttgctttaaacattgactatggaactgaataaataaagattcaattaacgcatcagtattaggattcactctaaaacgattaatagttttataagaaggtgtttgatcttgagctaaccacatcattcgaatactgtcatgaagtaatttctctattctacgaccagaaaatacagattgagtatatgcatataagatgatttttaacatcatttttggatgataggatgttgcgccacgatgatgtctgaattcatcgaattcgctatcaggtatcgtttcaacaatttcattaacatatcgcgaaatatcattttgaggaattctaacagaagtttctattggtagtgtaagttgggtcatgttataatttttatacataaggcacctcgttaatttagtttagtggtatttattaaattatacgaaagtgtcttatttttttaaagtatttcaaagtaaaattacatgttaatacgtagtattaatggcgagactcctgagggagcagtgccagtcgaagaccgaggctgagacggcaccctaggaaagcgaagccattcaatacgaagtattgtataaatagagaacagcagtaagatattttctaattgaaaattatcttactgctgttttttagggatttatgtcccagcctgtttaaatgtcagatagtattttttaaattgattttaaatattcttgaccttttgctttatcgtatacgttttcccatttagctataacgattgttgataatgcgttaccaataacgtttacacatgtacgtaccatatctaagatacggtcaacaccaataattaatgctaaaccttgtgccggtaagcccatagcacctaatgttgttaataaaacaacgatcgaagttcctggtactgccgccatacctttagacgtaatcattaatgttaacatcaatacaatttgctctgataatgttaagtgcattccatacatctgtgcaacgaataatgctgcaatagattgataaagtgctgatccgtctaagttaaacgtataaccaattggtataacaaaagaagtaatttcttttggagaaccgaagttttccattttcttcatcatgacaggaagtacagcttccgaacttgatgtagaaaatgctaaaagcaattcacttttcaagattctaataatattcatgatattaataccacacatccatgcaactagtcctagtattgcgaatacaaagaacaccattgcaaagacaacaactaatactaattttaatagtggtaataatgcggatgcaccaaacgtaataattgtagtacaaatgaatgcaaacactccaattggtgctaattttaaaattttattaatcatccagaacacagcttcaagcgatccgcttaaaaattctttaactggttctgcttttttacctactgcagctaatcctaatccaaagaatactgcgaagaagataataggtaataattcacccttatttaaagcttcaaaaaagtttgtcggaataatatgtacaatggtatcaataaaatgatttccatatgtagattgttctgctgcatgtgcagttgattgatatttagaaatatcacctttaggtaattttgttgggtctaatccagcacctggtttaaataggttaccgaagataatccctaaacctattgcgattgttgtaataatttcaaagtataaaattgttttccagccataacgccctacagttttcgattccccaacgttcgaaatagaaagcgctagtgagcaaaatacaactggtataacgatcattttaattaaatttaaaaatacgtcaccaaatggtttaatgtaatttgctacgttttcttgtccatataataaaagtcctacgacaacacctaacactaatgcaataacaacttgcataggtaggctaatttttctcttgaatagagccatagtacaaactccccttcatctgacatcactcaattatatcagaaaattgataattatctataaaaaattaaaatatttatcttttatagatgtcaaaaatcactaatttccatacaaaaactgtttactttaaataattaaaattgaaggcactaaactgtttcaccagttatacgcttcactattttgatggtttataattttgattaaaatatttatgctttgcagttttcaaacttttcttagtctctgtatcaaagccttcaacaaataatcctttattagtactgattggttgcacaacataagttacaccaggttcatctttaaacgtaacttccttatagaagagaccttttttagcactatactctgttttttctgatttaattttatcttttagatttttttcttccaagtaactgtcaattagttgaatattcttatggccttgatatgttttcaaaccaaagaaaaatgctacagcaacaattaacgaaataaataatataataataactttaatcgcgttttttttcttcttcattatgtgactcctttttgcttatctattcagtatgaacgaatcaatttatttaataaagagtttttaccagattgtaacaatttttttattctcaatattattatagaaatcgaattacatacacgatgcttttaaaaaatttaataacaaatttcattttactatctatcaaaataattgactacttttaacaattaaggatgatacaattgcatttttttcaatttaaaaaatcagtcatatcagtcattaccgatgaaaatactaagatattgatatatttttcattatttaacatttaaattcaattatagacaattcgataattgcgatgaaatcagtacttgacaactattacacttcataatattgtttattttaacaaggagtgattggatgtatgtagaaaacagctatcttagcaaacagttgtgttttttattttatgtttcttcaaaagaaataattaaaaaatacacaaactatcttaaggaatatgatttaacctatactggttacattgttttaatggcgattgaaaatgatgaaaaacttaacatcaaaaagttaggtgaacgtgtattcttagattctggtacgctgacaccattactaaagaaattagaaaagaaagattacgtcgttcgaacacgcgaagagaaagatgaaagaaacctacaaatttctctaacagaacaaggtaaagcaataaaaacccctcttgctgaaatttctgttaaagtctttaatgaattcaacatttcagaacgagaagcatcagatataattgataatttgcggaattttgtttctaaaaattttgactattccgacaaaaagtaacttcctatcataaggtgatgggcagaagtatgcatcgctatgtttattcattatctttattgcttgtataaatctcgatgctcagttcttttgccctgattccttatcaggcacaaatctatccatttataacttttttatctccccttttactttatcttttttaatactactcatataatggctttgtaatacaaatttatataatggaagtgatgatattgaacttcaatcaattcgagaatcaaaacttttttaacggtaatccaagtgatacatttaaagatttaggtaaacaagtatttaattacttttcaacaccttcatttgtaacgaatatatatgaaacagacgaattatattacttagaagctgaactagcaggtgtaaataaagaagatattagtatcgatttcaataataatacgctcactattcaagctactagaagcgcaaaacacaaatctgaacaactcattttagatgagcgtaacttcgaatcattaatgcgtcaatttgattttgaaactgttgacaagcaacatattactgctagttttgaaaatgggttattaactattaccttgcctaaaatcaaaccaagcaatgaaactacttcatcaacatctattccaatttcatagtaaaatttaaaatgaatacactactaaagccttaatgtcatgctacgaatattgcgcatgatattaaggctttgtatttaaatttaagaatgcttcgtattacatatcaactgtgtttcaatgaaccatattctttttgatataattggcgcattgtaaataatgcaatacatccaaataccgctaagaaaataaatgctaaatgacttgatcctgttaaattagctacgtatgtgattactagtggtgggaagaatcctcctaaaccacccatcattgatacgataccatttgcggatcccgcttcatttgagaagtatgatggtactaatttgaagattaagccgttaccaatacctgcacaaatacttattgttaaacaacctacagtgaataatgcgatatggtctgaaatacctaaaataatggcaccgataatcataacaacaaaatcaatcatcaatactttaactgcattaaatttatcacctaaaatgccacctattggtcttaagaatgttgccagcgcaatgaatacacctgatcgaataccagcatctactttgtcaattccaaaatgatttactaagtagttaggtaagaaaataccaaatgctacaaacgcaccaaaagtaatgaaataccaataacttaagtaatataatttgtagtttttggataatgttttcatttgtgccattaatggcactttaattttacgttcttgtgtatcaccaaatataaacataattaatgcaaataaagcgataataattaagtaacttctaacagttgtttgccaaccaataatacccgcaattggcggtgctaaaaatgaagaaactgctgtaccgatattccccataccataaataccatttgctagacctactttttctttagggaaatatttaggaactgatgtaacaccaactgagaaaattgcaccacctacgccaaggaaaaatcctgacgccattaacatacccggtgtttgtgcttggcttaagaaaaatattgggaataacaatacgataaaactagtaaagaatacccatttagcgccaacaatgtttgttagataaccaaatggcacacggagcaccgatcccaaaataactggtatcgctaaaatgattgatatttgaccttcagtaacattgacatcttgtttaataaagggcattaatggcgcaattatactccaagccataaacccaaccactaaacttaatgtctgtaatgtaagttgaaagctaccttttgttttgtacatacgtttcaccttcaccaaaatcatttattttttaatagatatcaatactctgcctatatattagaggtcaatgttatttaaaaatgctttcatttatatgaaaacattcaatatagacaaagtattgactacatatatattttattatgattgtgaaaaagtgaacataaggattttcccttatttatgaagtaatttaccctatacaatgtccctttaagatacttttagacacttattcgccatcattttaatcatattatttaggaacactcacatacttttttaaaattttttcaattagttacaattactgcttgaaaatcacgttacgttaccctttatgctgacaacgtaaggaggtttatcatgtataaaatcaatattattagatcagattccgtctataagaatatactcaaggcaccattaaacgaccgtgattcaattttcactaaagaaatattagtaccttttaaaaagaaatttgaggcacagcatatgcttatttataatgatgacaaccagataatgaatgcaaatcattttttaaatgcctttcaaatttcacccaaagatttacgcatgtctgaccaaatgtcaatacaatacctgaataatgatttctggagtaattgcgaaaaatatttaaaagttgctatagatcaattttcaaattatagtatctcatctcaagtttctaattatcatttcacagtattacttggagatagccaaaaaccacttatgtatctaaataaaaatcgcggtggtgatggtggcataccaggttatattatgatttatttagtgccgagtacaagtacaattaattctatgaaaagcttaattgcacatgaagtaaatcataatatgcgctatcaatatattgattgggatggcggaagtttgattgaattgattattgcagaaggattagctgaaaactatgtagaatcattgtatggtaaagcgtatattggaccgtgggtaacaaatactaattggagtcgtgataacgtaaaaatcaaaaatactatttataatcatttacatttaaagcatatatttgaatcgatgccttatctctatggtgatgatattaataaacttcaaggtaggcctatcgttggcttatctcatgctgccgggtatgcatgtggttatcacttggtgaaatactttttacaaaaaacaaacatacctattgaagttgccacaacacttccagcacaaaaaataataaatgaggtgactgaattttggcatacacatacactttaaaagatattattgaaattacaggtgtaactaaaagaactttacattattacgatgaaataggattattagttccagataaaaatgataaaaattatcgcgtttataaacagcaagacttagaaaaattacaaaagattttaatactcaagtcttttgattttgatatcgctaaaataaaacaatacatttcatatgataatgaacaattgcgaaagttattatcagagcaagtaagcaagttagataaaaagatttctgacttacaattaattagactctctgtatatgaatttattaaaggacgctctctaatagataccagcattttaaacaagacactacagtcacaatatgataaagaagcatctataaaatatggtcatacgaaagcatatcaatcatttattagacgtaaagacagcttacaatcacaggatatcagacataaattgacaactatcttcaataaatttaatcatatgtctttgagtcattattcaatccaagattgtagtgatctcgtatttgagtggaaggcatttatgaacactatcgctgattttgatgatgaaacattatgctgtattgctaaaacatatgaagatgatacgcgtttcaaagattactttaattcatatgataatcaaaatttagcatcatacatttcagaagctgttaattattttttgagcaatgagaataagagcgacaatttttaatcctcatacagatgctacaacactgaatacaccaactaaaatacttgttcaaagtagaaaactaattatttattctctaaatcaataactatattaaaagttatacctttgcaaagcgaattagtataggttgccgaaaggagaaaggattaggtttcattcaatttataaaaaaaatatatttcgaaacatacaaaagcgccagaagataatcatttcctctcgcgcttttatactaaattatattaatttcaaactctaaaactctaataatttctttttcaatgcatattcaactagctcaggtttactctttaagccaagctttgtcataatatgcgtcttatgtgcttctactgttttcacagatacaaataatttctctgcaatttctttatttccgtaacctttggcaataagtggcaatatttctagttctcgttttgataagattttaaaaggatctgatgtgtttgcagtgtcctgatttgaattagatacaaattcattcactaaagatgttgttagtttcatatctacatatgtttcacctttatatacagttcgaatagctaacaataattgttcatcaggtgcatttttcaatatgtaacctttcgcaccattacgcaacacatggaacaaatactcctcatcatcaaacattgttaatattagtattttagtttcaggaaaactgtcagcaattttactcgtagcgataagacctgactcgcctggtggcatacttaaatccattagtaacacatcaggtttatattccattactttttggtaagcttcgacgccatctgcagccgttgcaacaacttccatatcattttgataatttaaaatcatagagaaccccgtacggacaacagcgtgatcatcggcaatgactattttcaattttattcccccaatgtatgtttcaaattggaatgttcaatgtaacattggtaccctcaccaattttcgtttcaatattgacgctaccgctgactaactcagctcgctcattcattccatataaaccgagtccagaacctttaggcttagaacttggatcaaaaccatttcccgcatctatcacttctgctaccaaatggcgcccagtttgacggatacctacatttatttcatttacatcagcgtatttcaacgcatttagaatagcttcttgcactactcgataaacaaccgtttcaatatcactatcaaagcgagtatttttaatatttgatgtatatatgatttttattccataattttcttcaaactgtttaaaatatgatttgaaagctgcttcaaggcctagatcatccaaagaagcgggtcttaattcaaccgacatattacgtatatcatcaattaatttagcgacaatatattcaatattttctgcgtcttccaaaagcttagttgtatcttcttgatattttaataatctcaattgaacatctacattgagcatttcttgaatcacactatcatgtaactctctagaaattcgctttctttcattttcttgggctgagattgttttacgcatcatacgttgttgatgtaatttctcttgctgttcaatttgtgatgaaacattttgaagcgtaaatgcatgaattcccctgtcttgatcaatcaactgatatgttgctgtaaatggcatcactttttgatctttcgtcttcataaatacttggaaattcgtagcttgtacttgcatcgattctaagaaacagtctttacatgattgtacatcataggcatttgtatacccttcacatctgtgacaaatcgcattcgccacagcactgtaattatcttcttcagataatatatctttagcagcatcattcattgcaataattttaccgttatcatcagcaaaaactatcttttcgattgaatgctcataatattttttcaataaagtatctaactgtatactgtcctcattaatcatgacttacaccctaattcatctcattatttatcgtcattgaaaataccaaacttacgttgaatatcatcattatcaaatatttttggtaaaggacgaccatctctttgaccaaataatagtacgccatacacttgattcttataccaaagcggcactgctaaaactgctgttaatgattcactcaataaaattggatagtcaatcttttcttcaggccctaaagctaaaccaacattggctattaccatacgctttcctgttttcataacagttccagctaatccacgaccttttcttagaataatcaatttaaatcgattatttttattacctgaaacatagtgccattttattggagatgatggtttgttagattcatagaaagcgattgccgcaaaatcataaccctcttctttgcgtattttatctaatgtctcttgaaatctacgatcttcaattattgcttctggtgtcaaatcctttcacctcttatgcttacactttattcttacggtaaataatatatctgcgatttatatatgtcaaaggtacactccaaacatgcaccaaacgtgtaaatggccaacaagccataatagtgaaacctaacaatatatgcattttaaatgcaatcggcacaccactcatcaatgacgcatctggttttaacataaataattgtctaaaccaaattgataatgaagttctgtagttaaaatctggatgttgtatattcgttactaatgttgcgtaacatcccataaatacgataagtaataataagaaatttacaaatatatccgacgctgaacttaatcttcgaatacttttcgtagtaacacgtctcgctgttaataaaaacatccctaccaaagttattataccaaagatgctaccaatataaacagcgcctatatgatataaatgctcagacacacccactgcatccatccatgatttcggtattaacaatccaactacgtgcccaaaaaacactggaataatacctaagtgaaataataagcttccccacatcaacctttttctttctattagttcactagatttagctgtccaagaaaatttatcataacggtaacgtgcaatatgacctgcgacaaagacaactaaacataaatacggaaatataacccataaaaactgattaagcatgatgtttcactccttttggtgatgtcaaacataatttcaatgtttttctaagtgcttgaatcacataggcatatggattattatcttcaccaagtgcattcgccatcacatatgttccatcctcaataatcataatgattaattgaatattctcttcagctcttggatcatttcgccattctgccacttgcaaaaattgaagcatcaacggtagataatcagaaagttcattatctaccatttctagtccaaacatttcatataatacctttaatttagctaacatttgcccacgttctttttgcgtatcaaatttgttatacgtcatatataatggtgcttttttcgtaaaatcaaatgtatctgtataaatcgctttgatttctgataatgaaaatgtcatcattacatttctaaatgctactaaatcttcatatgctggatgatctttcgaaattgtttcttcaaaagtttttggatgaaaagttaatttttctggaaaacataactgttgtgccatatatccaaaactttcctgatattttttaaaattatcgaaattaatcacggaaaatccctccatagaaattctcattataaatttcttgaccagttttccctgaacctattgcaacgccacagccttcacagttatctccaaaatgctcgccgccgtaattgtatcctgtactaccttgtgcgtgatacgtatctaaataggtttctttgtgtgatgttggaataacaaatcgatcttcatatttggctagtcctaataaacgatacatgtctttagtttggcgctccgttatacctaatcgctctaatcgagaagtgtcaaatggctgttgagtaacttgagatctcatataacttctcatcattgccatacgttgtagggctccttttactggttctgtatctcctgcagtgaaaatattagctaagtattcaattggtaaacgcatttcttcaatggctgggaaaatcgcatctggattttgagttgtatttttaccttcaaaatagctcataattgggctaagtggtgggcaataccaaaccatcggcatcgttctaaattcaggatgtaacggaaatgcaagtttatattcaattgctaacttataaattggagagttttgtgcagcttcaatccaatcgtaaccaataccatctttttcagcttgagcaatgacttcttcgtcaaatggatttaagaatatatctaattgtttttcgtataaatctttctcgtctactgctgaagctgcttcatgaacccgatctgcatcatataataaaacacctaagtaacgcatacgtcctgtacaagtttcagagcataccgtaggcatacccgcctcgattctcgggaaacagaatgtacacttttcagctttgttcgttttccaattgaagtaaactttcttatatggacaacctgtcatacagtaacgccatccacgacatgcgtcttggtcaactaatacaatgccatcttcatcacgtttatacatagcacctgaaggacacgatgcaacgcaacttggattcaagcaatgttcacataaacgtggtaaatacatcataaaagtttcgtcaaattggaatttaatatcttcttctattttttggatgttaggatcttttgggcctgtaacatgaccacctgctaagtcatcttcccagttaggtccccattcaatttcaatgttatcccctgtaatttctgaatacgctctagcaactggcgaatgcttccctgatttcgcagttgttaaatgttcataattatagttccatggctcataataatctttaattaatggcatatctgggttataaaaaattttacctaaagcaatttttgaaattctacttccagattttaattcaagtttccctttacgatttagtacccaaccacctttgtagtgttcttggtcttcccaacgtttcggataccctacacctggcttcgtttctacgttgttgaaccacatgtactcagcacctggacgatttgtccaagtgtttttacacgtcacactacacgtatggcatcctatgcatttatctaaatttaataccatcgcaacttgcgctttaatcttcaagccaattaacctccttcatctttctaactgctacatataaatccctttggttcccaattggtccataataattaaagtgataactaatttgtgcgtatcctccgactagttgtgttggtttcaaatggattctagtcggcgcgttgtgtgaaccaccacgtgtatctgtaatttctgacccaggcgtttgaatatgtttatcttgtgcatgatacataaacattgtacctttaggcatacgatgcgaaataactgctcttgccgttacaacaccattacggttatacacttctagccaatcattatcttggatatcgtgtttttcagcatcttcatttgatatccaaaccgttggaccacctctaaatagtgtcaacatatgcttattatcttgatacattgagtgtatattccattttccatgaggcgttaaataacgtagtaccaaagcatctgtaccacctttaattttcttatctctattaccaaataccattggcggcaatgtcggtttatatactggtaagctctccccaaattgttggaaaacttcgtgatccacataataactttgacgtcctgttaatgttctaaaaggtactagacgttctatattcgttgtaaatggtgaatatcgtcgaccttgtttatttgaacctggaaatactgctgtcggtattacttctcgtggttgtgaagttatatttaaaaacgaaattttctcagcagcgcgttcgctagaaatatcttttaacggcattccagtttgttcttcgagatcttcataagatttttgtgataatttaccattcgtagcagatgaaatacttagtattgcatcagctacattacgtgctgtatcaatacgtggacgattcgctctcacagaatcatcatttgtatcactccacgtacctaacatactttttaattcttcatattgttcactgacaccgaaacttacaccatgcgctccaactttccctttttcaagtacaggaccaagcgtgacatatttgtcgtaaattttagtgtagtcgcgttctacaattgcaaagttaggcattgtacgtccaggtaccgcttcaatttcacccttcgaccaatctttcactacgccgtatggtgttgaaatttcttgctttgtatcatgactaagtggcgttgtcataacatctttaaacgttccaggtaaatagtcttttgccatttctgaaaatgcttttgccaacgttttataaatatcccagtctgaacgcgattcccataatggatcaatagctggattaaaaggatgtacatatggatgcatatctgtagatgacaaatcatgcttctcataccaagtcgctgctggcaatacaatgtcagaatataacggtgttgctgtcattctgaaatctaaagaaacgactaaatctaatttccctgttgtttcctcacgccacgtaatttcttctggcttttcatcttcatttggtgtagctaataatcctgattttgtgccaagtaaatgcttcataaagtattcttgaccttttgcagaacttgagattagatttgagcgccatataaacaatgatttcggatgattctttttcaaatccggatcttctatcgcaaattgcgtttgttttgacttaacttcatctatcgcgcgttttaaaattgcctcattcgactcaatgccttcatctttagcttcttctgcaaacaacaaactatttttattaaattgtggatatgatggtaaccaaccaagtctagccgctaaaacattataatcagctggatgttgatgctttaactcctctgttttagctaatggagattttaaacgatctacatttgactcttcatatttccattggtctgtcgcaaaatagaaccaacttgttccgttttgcaaacgtggtggtccttgccagtctttcgcaaatgcgacagtactccatccttcaatcggacgacatttttcttgtcccacatagtgagcccaaccgccaccattcacaccttgacagccacataacataactaagtttaagattgaacgataaatcgtatctgagttaaaccaatggttaatacccgcacccatgataatcattgaacgcccttcagtatcgatagcgttttgcgcaaattctttagctacttgaatgacaacactttgttttacgcctgaaatggcttcttgccaagcaggtgtatattttgattctgcatcgtcgtatccttttgattctaatttatgatcaaaacgatgcacgccatattgacttgccattaagtcaaaaattgtagcaatacggactttgtcaccatttgctaaagtgacttgtcgagttggaattggacgattgaatataccatctccatcactatcaaagtatgggaattgaatcgtttctaattcgtatccaccttctgtcattgataatgtaggattaattttagaaccatcttctgtttctagttttaagttccacttcttaccttcttcccaacgttgacccattgtgccattaggtactactaaactatcgctgattgcatcatgaataactggcttccattcgccttgttctgttgtttgacctaagtcacttgctcttaaaaatcgacccgctttatatccattttcatcttcatccagcatgataataaacggcatatctgtatattgtttggcgtaatttataaagcgttcattaggttgattaacataatgttcttgtaaaataacatgcgtcattgcttgtgcaattgcagcatctgaaccaggattcggtgctagccagttatctgcaaacttcacattttctgcgtaatctggtgctactgaaatgacttttgtacctttatagcggacttctgtcataaaatgtgcatccggagtacgtgttaaaggtacattagagccccacataataatgtatgatgcgttataccagtcacttgattcaggcacatctgtttgctctccccaaatttgtggagaggcaggtggtaaatctgcataccagtcataaaaactaagcatttcaccaccaagcaaattgatgaatcgagcacctgctgcataactaatcattgacatcgctggaataggtgtaaatcctgcgattcgatctggaccatatttttttattgtatacagtaattgtgctgcgattatctctgtaacgtctttccaatttgaacgcacgtgccctcccatacctcgggcttgcttatattgtttggctttgtcttcattttcaacaatagacgcccatgcagcaacgcgattaccattgttttcttctaatgcttcagtccataaatcccagagttttccacgaatatatggatatttgattcgaagaggactgtattcataccaagagaatgacgcacctcgtggacagcctctcggttcatattcaggcatatccggaccacaacttggatagtcagtttgttgattttcccaggtaataacaccatttttcacaaatactttccaagaacatgagcctgtacagttaacaccatgtgttgttcttacttctttatcgtggctccaacgttctctgtacattttttcccattctctacttttactttctaggatcgaccaattcccattaaatttttctgttggcttaaagaaattcaatccaaattttcccatatttatatcctcctacgtataaaaatacgatgtgtagatgtcgtgtttttaaatactttaaaatgcccaagactattgctttaattagattgtacattttttcacaaacataaaatattagggaatcacctaattacttaaggaatttccctatcaataacaggatttcattgaaataatacacaatcatgtatggtcatgcttattgccaatctaaatcgttcaaatttggcacaacgacaaataaggcttcaacacgaatatattctctcggttgaaaccttacttattcatttattttttataaattagtgacataacactgtattagcatctgcacgatcggttgaaatatatgttacattttcttgctgcttaataaatgcatcatagtaatcatattgcgacgaatgatatgtgccattcgatgtatcatttgggtttagcaaacagccataaccttcgtcatataaatgttcacagagtataagggcgtcatgtttagaaccacttactacataaaattgcttcgtaggatcatatgatttaggagtgttttcagtatagccaacaacttccccaataatacatatacctggtttcgcctcaattgaatagtgttgcaattttgaaataatattacttaaacgccccttaacaacaaactcgttaaaacacgatgcttgaaagacaatcgctatcgggtaatcaatatctgtgtattgttgtatctgtgtgataattttccctaaacgttttacccccatataaattgctaacgtgccaccattcactaaggaattgacatccacttcattttcttctgaatctttaaagtgacctgtagaaaatgtcacacttttagcaactgtacgcattgtcaaacctgtctgcatagtagcaactgctgcgctcgctgatgtcacccctggtacaatttcaaacgcaatatgatgttcatttagtgtgtcgacttcttcttgcacacgaccaaatatcgctggatcgccacctttaagtctaacaaccttgttataacgacgcgctgcttccacgatacagtcatttattttttcttgctgaatatgttttgcatacggctttttaccaacatcgataatttcagtagtcaaattcgcatattgtaaaatcaacggattcactaatcgatcatatagaatgacatccgcttcacgtattaaacgctcagcttttttagtcaaataattcggattacctggtcccgcacctatcaagtaaaccttgccatattcatctacagacatatatatacgttcccgtctgtaacttctatctcataaacatctacacaaccttcatcaggttcttgaacaatacctgtatttaaatcaattttttgatcgtggagcgggcaaaatacatattccccactcactgtcccttcagacaatggtccttgtttgtgtggacagatattgtgaatcgcatgaattttgccactttctgttaaaaacaatcctacctctttgcctttgacaataaccttttttccaattaggggtgttaattcatctatagttgtcactttaattttttcttttgtttccatgtattacaccttctccacttcaaaaattttacgtgcttgcgcattgctagttattgcttcccaaggttcagcttcgactgcttttttagcatccataatgcgttcaaatagttcattttgtctttctgggttaagtaagacttcttttacattttcaaatccaagtcttcttaaccatggcgctgttctttcagcatatatacctgtttcgcgataatattgcatcaaagcaccacataatttgattacttcatcttctgtttctacagttgttaaaaattcggctttttcaacttctgtaccaccattaccaccgatatagatttggaatccattttcaactgagataataccaaaatctttaacacctgattcaacacaacttcttgggcagcctgatacacccattttgaatttatgaggtgtatcgatgtattcaaatgttttttctaaacgaatgccaagtcgtgtcgtgtattgcgtaccaaatcgacaaaactctttaccaacacagcttttaactgagcgtgttttcttaccataagctgatgctgaacgcatacctaggtcttcccatatatttggtaattcttcttttttaactccatacaaaccaacacgttgtgaacctgtcactttaactaatggtacatgatatttcttagccacttctcctagacgaatcagttggtctgcatctgtaacacccccacgcatttgaggtataacagaaaatgtaccatcattttgaatattcgcatggtaacgttcgttagcaaatcttgattctctttcatcttcatgatcatgtggataaaccatgtttaaataatagttgattgctggtcgacattttggacatccacctttatttttaaagtttaaaacatgtcgaacttctttagatgtttttaaacctttcgctcttatttgcgttacaatttgatcgcgtgtcaaatcagtacaaccacatataccagcaggttttgcggcgacaaagtcatctcctaaggtgtgctgtaatatttgagcaatttgcggtttacatttaccacatgaattccccgcttttgttttagccgttacttcttcaactgttgtaaagccattttccgtaatcgcatttactatagtgcctttatcaacaccattacaaccacaaattgtttcatcatcagccatatcaacaattgatagcgatgcctcttctccacctttagtaagcaatgataccagtgtgtaatcttcagtagattcaccttttttcatcatgttataaaagcgtgaaccatcatcgatatcaccatatagtactgcgccaactacattaccgtcttttaaaaagatttttttatagttattatcaacactattaaatatttcaatacctttaatttcagcattttctacaatttgaccagcactatacaagtcacacccagaaacttttaatgacgtaaatgttgttgatcccttgtatccgttcgtttctttatttgttaaatgatcagctaatactttaccttgttcatatagtggtgcaacgagtccataaactttgccgttatgttctgcacattcaccaactgcatatacattgctatcacttgtttgcatcacatcattgacaacaataccacgattaacatctagacctgattctttggctacttctgtgtatggtcgaatacctactgccataacaactaagtctgccggaatctcgcgtccatcagccaatttaacaccttcaacatcatcttctcctaagatttcagttgtgttggcttgcatttcaaacttcataccttgcttttctagatctgctttaagcatatttccagctttacggtctagctgcatttccatcaaccattcagctaaatgtaacaccgttacttccatatcttgatctaataaaccacgtgcacactctaaacctagtaagcctccaccaattacaattgctttctttttagtcttagcaatgttcatcatttgttcagtatcatcaatcgttctccaaccaattacactcggtaatgtcgaacctggaactggaatgacgaatgctttagaacctgtcgcaaaaatcaatttatcgtatgatacttcaataccatttgcagtagtaactgattgatttgctctatctacttcaatcacaggatcatttgtaattaactcaataccatgttcctcataccactcatatggattcataattgtttcttcaactgtcattttattttgtaaaatatttgaaagcatgatgcggttatagtttggataaggttctttacctattaccgtaatatcatataaatcgttggcgcgctctaatatttcttcgattgttcgaatgcccgccataccgttaccaatcattactagtttttgctttgccataaaatatgcccctttacttcataatatttatttcaaaaaggttttaattttcgtttgtgcttttatattttcattggagtcattaagactttctaatctatcgttaataatttgttttaaaatcgggtcgaagttaattgaaggtgtgatgtgtatatctgtattaataaccatgtcattcatttgctgcttcactttgttaacaagtcttccgtcatataaaaataaaggtacgacaatcaatttttgataccgtttcgagatgctttctaaatcatgtgtaaaactaatctctccatatagcgttctcgcatatgtcggcttgctaatttgcaaatttcgagcgcatatttgtaactcttcgtgtgccttagtaaactttccattaatattgccgtgtgcaacaaccataattccaacttgttgtttgtcacctgctaatgcatcacaaatacgttgttcaattaatcgtctcattaaaggatgtgtgccaagtggctcgcttacttctacctttatgtctggatgccgtcgtttcatttcatgaacgatattcggtatatccttgagataatgcattgcactaaagattagcaatggtacaattttaaaatggtcaaccccactttgaaccaacgtcgtcattaccgtctctaaatcctgatgttcactttctaaaaacgcaatatcatagtgatgtatatcatcttttactaattcagaaataaatgcttctaacgcttgattctgtcgtccgtgcctcatgccatgtgcaacaatgatattcccattcacatttaccaaccctttcacacgtattgtataccaaatcatttcgtttttgtgaaaagaatcacattataatgtaaaatcagggaattccctgatgcctgtagtcatgcatattccttatacattttccctttttgttaaatcaaaaaagcgaccgatatatgaatccctactcaacattcatttgagcaagcatcaatatatcggtcgcttgtagtgtatattattattttaaaatggtggttgacctaatattgtttcgtcaaaacgctcaggtatcaatactttgcgcatgattacacctaaatcgccatcatcattttcatgttcgctatatatttcataacctcttttttcataaattttaagtaaccacggatgcaatcttgcagatgtacctaaagtaactgccgctgactttaacgtatctcgcaaaaatgcttcttcaacataagtaagtaattggctaccatagcctttcccttcatactcaggatttgtcgcaaaccaccagacaaaaggatagcccgaaatacttttcacacttccccaaggatatctaaccgtaatcgtagatataatttcatcatcaattgtcatgacaaatgtagtatttttatctatattttctttaacagcatctaaattagcattaaccgaaggccagtcaattccaagttctcttaaaggtgtgaatgccttatacattaactgatgtaacgtttctgcatcgttttcattcgccagtctaatcgtagtgtttgtcatttcaatccccatcactttctttttatttggaatgcatcatagttaattcaaactaaaaatccccttatagcgtaccaacatttagcacatgtgtcagataacatgcctcatctaaataagataggcatgcgataatcggttatttcattattgactgcatcagtaaaaaagtctaggacatgaattaatgatatgtacgcttcaaagctttcatttttcaatgtctactttgaagcgtgcagttcataatgtcctagactctacaatgttatattggcagtagctgactgcgggccccaacacagaagctgacggaaagccagcttacagtaatgtgcaagttggggaacggggccccaacacagaagctggcggaaagtcagcttacaataatgtgcaagttggcggggcccctaaaaaggatgattcaaaattcattgttgtcacaacatcttcaattatgactccattactgttgctctaaacgattgcgtttaccatttaaaaatgcataaacaagtcctacaaaaataccgccacctacaaagttaccaaggaatgcaaaaacgatattttttaatacatgtaaccaagatacagcatcaaggttgaagaacaccatacctgcatataatccagcattgaatacaacgtgctcatatcccatgtatacaaagactataacaccacaagcaatgaagaatgcttttgtcaatccgcctttgaattgcatagaaataaaaataccgatattaataaagaagttacagaaaataccttttgtaaaaatattcaaccaagtcgaatcgactgtctttttctgaactaaggcagttaaggcttgtgtcatttctggtgtcataacatgtgcatatttcattaagaagaataatacaaaaccacctaaaatatttccaaggaaacaatataataaaatccacatcatcttattaagagaaacaactttataataccagccaactgtaaaatacataaaattacttgttaataattcagaattcgttagtacaactaagaccaatcctaagctgaaagcaattgctcccattaaattaatgagaccatcaacatgtgtacttgcgaattgtgttttaataccaaacataaaaacagtaacaatggacaataagaaacctgccatcatagattttagcatgtatcgtcctggtgtttgctgtaccatcacttgtttcatttgaacagatgatgatattgagtctacgattgctttagttgaatacgtatcttcaactgttttattattttttatcacagcacttcccccatttactattatcaaataaattttacctattaattatattagtatttagatgtaattcatagattaaaattcagaaaattctttttaccaattcaaaactaatatttactcataaaaatagcgagatagatatcgcgacataaaacaattggtatcattttaattgcgctcatctcgctttatgtaagtattacttattcttttttaaatttgaaaagtaatgtaaaccatatgcaaatataccgtagcctacgactgtacgcaaaataaatctaacaactttatttggtacacatttcgaagtaacagtaattgaagataaaagcgtagtaaaaatatataatattaatactttaatgtaacgttgtgccatcgaatcatccttcattcaattaataatattacgttattattataaactgaatggcatataaaattttttacatattttcaacaactttatttcaataaagcatcaagttgatctaatgtttgattcatccctttctcaacacccatgtttatgacttgttgagcggcttcttttgttggaaataccgatgttgatgtcactgtcgttttcgttgtattgaactcggaaaatgacaaagtaatcttcatgcttggcatttttgtatcttttgcaccttgaggtgtcgcaaatgagtcaatatattcaattaaatatggacgcttaaccgttttatattctgctaatgtatagctagtcattgtaggtgttttaatcgcgtaaaatgcatcaccgcctgaaacagcattaaagcgaaacactttggtactagcgtcttttggatgaaaccatttttcaaataatgcctttgtcgtataggcatcaaacaccttttcaatcggtgcttctatcgttcttgaaaaaataattttattatcttcaactttaatcatcatcttcccactccctatcttttatatttactcatcttaacatgcattgagtgacatatgttaccaaatcatttgttataaactatagtaatattaatcattccctctgttgaaattgataactacgaaataaaaaacacactctattcagctattaacagttgagtagagtgtgcaaacctgttgaattaatgcgctaacatttcttctttgatttggtttttatttaattttgaaggataatatgttggccagttatccatttcttttaataacgcgtcattatcattacccataaagatatggaagtgttctgcctttttaggtgcaatgttgtgatcgctaaattggatgaatttcggtaagtctttatcattaccatcgaccaatttaaacataaatctcacgccacggttacctttaggatatttcaatgtcttcttaccattgtattcatatttaccagtgtgtttcttaccatctttagtaaatgtaatttcatttccttttatatcaatgttagtaatatcagttttatatcctttgtcataataagcttttaaatcttcagcagatttcttcggatcattttcagctttatgttccattacttcatcaagcgtaccgtcttttaaataagggtaaacagattgccattcaccagcataatcgcttaattcacggtctttaacttgctcatctttaaaatacccatcagaaattgctttgtcgtgtttactttcagctttgtcgtctttcactttaacaccactgtctaaagctttaccgatattttcaatattcgatttcattaatgattgatacgtaatattatcttttttctgttgttctttatttaaagactccatgttgtagaattttaaaggcttcgcatctgtttctttacgaattgtttcagtcactttattcgcaacattatcttcgtaaagaatatatttagcattgctatctctaatttctttaacaattttagttaattctttttgtgatggatcttcagcattcatgttttgaatacctttttgaacaaaaccataacgatcagctaagtatccaattgattcatgtgaaatgaatactgcattaccttgcttatcttttgtaacttgcttcatatcgttatcaattttcttaagatcgtcgtttaattttttgtaatttttctcatagtcatctttatgttttggatcttttttcactaattcatctttaatttctttagcgaaagtttggttaattttaggatctaaccatacgtgtggatcatatccaccatgatgatgatgttcttctttctcatgatcatgtccctcatgttcatgctcttcaccatgttcgtgttgatcagttaaaagctttgctttatctaatttatcttctaaagacagttttttatctttatctttgatagtagatgcaactttcttagcaaccggatctaaattatcccctgtatacataaacaagtctgacttgcttgcgcttaatatatctttttgtgttggttcatagctatgtaaatctgtccctgctggatagattgatgataccttcacgtgttttccaccaatttgctctgcaaatgattgcaatggataaactgtcgttttaattgttaccttgccatctttatcttttccatcatcattcccacatgcggctaatgataaagttacggctggtacaagaagtaacatacctaatttctttttcatagtcaccctcctaaatagtaatctttacgttttaaaattatatactcatgctacttaaaatacaagcactgtttttataaataatataaagtcgaatcatactttaggtatttaccacttttcgttttatctaatacatgactattgtacaaatatgatacagaaaactttatagtatttacgaacgtcgtaatataagaaaaaagacaatctctatcatattgctaatagaaattgccttttcatattgtcctaaaataacttgccctatttttatagtgtgacttttagatttaataatggtatttacatgatgctatttttatatgattgtcatctactgtataaaccaatctatgttcgtgattgatacgtctactataatacccagtcagattcgattttaacttttcaggcttacctatacctttcaatgcgccatttctgtcaatacttttaagtaactcattaatcttcttcaccatttttttatcgttctgctgaaaatacttataatcttcaaaggcttgaggcgaaaacgtaatatttaacctagccattatacatctatatctttcgttatagttttcccacgttctagatctgcaattgattgagctaagtgttcagcattatttggattctgttggaggtaaagcgtttccatcatggagttataatctgattctgacatgattactacgtttttatcatcagtagatgttacagttaccatatcactatcatcatttacttttgtcataagtgcctttaaattctgtcgagcgtatgaataatttttaataatcatatttatcgcctccttttaacacaccccaattgtacaaatatttgtacaataaaacaagagacacagaaaaaactactaatcaagattttgcacggagaagaattaatacctatcctgtactgattacctactaaacaatgtttacatgataatttccacctatttagacttcctacattaaaaagacaatctctatcatattgctaatagaaattgccttttcatattgtcctaataaattggtatcacttacttatctcaacaattaagactatttgattttatcttttaataacttctcataactttcataatcatatggatcttcaactttctcgccattaataaatgcagttggtgtcgtttttatatgattatctttagcaatttttttatctttctctgcagctttccaagacttgctatcttttgtcttgtaatcttttataattttattttccgtctctttatctaaatgcagttgtttaatatgtttatctaatagttcttttgttaaccattctttattttcatcttgctgggcagcaaataattgcttttgaaaatctaaaaatgatttaggtgcatacatcaatactgcatgactcgcacgcgaactaacaattgagtctttacctaagaaagctaaattgacaaattggtattccactttgtgattatctatataatttttacgcaactttggcatgactttttcatctaattctttacaataaggacatttatagtcgccatatatgacaactaatggtttgccgtttttcgaagatgtcgttgctgattcttttttaccgcaagctgttaaaattaacatgctcactataaataatgttagtaattttttagtcataataactcctgttcatatctagttcgtcatattttcttcatgataatccgcatcatgttgttgataatatcgtctcgaatcaaaatcttgcttatatgatacacgtttatcactaaaatcatatgcataataatgcacttcatcatcattactcaaaggtttataagctaaaatgataattttatccttatcatagacataaatattagcatctttgcgttcaaaatgatcaacacgatcaccgttgccttttttggcaagttgttcttgtttttgattttgaattttaactgcttcatctatttctttcacatatttatcattaccacatcctgatataaagactagtaataataataccgtcgccacaaatcgcttcaatgctcccactcctactatcaacttccaactaactttcaatataattaatactatacaccgtcaaacatcaatgcgctacaactactaccaatgcatttaatataaatatccaaagaaataacagttatgtatagtcaaagaaaaatatatttcattttctatgtgtatttgcaatcagtttttgataaaataaaaaaatagcattattaataaattcaaaaattacagttcaattcagagagggatgggataaaatgaactttgtaacgttgacttcggatgagttcaatgcgtttacaacaaagcatttttcacattacacacaatcagctattcattacaatcatagagttgatttaaaaggcgatgtgcatcttgtaggggttaaagatgacaatggtcaagtgattgcaggatgcttattgacagaagcacgcacacttaaatttttcaaatatttttatacacatcgcgggccagtgatggattatacaaatcaatcattagtagcatttttctttaaagcattaacgtcatatttaaaaaaacaaaattgtttatatgtccttgtagatccatatttaattgaaaatttacgcaatgcagacggtgaaattgttaagtcttatgacaaccgagcatttgttagaacaatggacacattaggctataagcatcaaggttttccagtcggttatgattcaatgagtcaaatccgttggttatctgtattagatttaaaggataaaacagaagaccagttattaaaagaaatggattatcaaacgagacgtaatattaaaaaaacatatgatattggtgtcaaaactaaaacgttaacgattgatgaaacgcaaacctttttcgacttattccatatggccgaagaaaagcatggtttcaaattccgtgagttaccatactttgaagaaatgcaaaagttatacgatgaccacgccatgttaaagttggcgtatattgatttaaacgagtatttaaaaactttacaattaaagcaacagcaattaacagctgaactctcaggtgttgaagaggcattggaagaaaatcctaattcaaagaaaaatataatgaaacgcacacagctagaacaacagctaaatagcaataagcgtaaaatcgacaatacaatagaacaaattgaacaagatggtgcagtcttaaacttagcttctgctttgtttatctacaatgagcatgaagtttattacttatctagtggttcaaaccctaaatataatgcttatatgggtgcctaccatttgcagtgggaaatgattaagtttgctaaagcgcatcatattgatcgctataatttctatggtattaccggtgacttttcagagtcatcagaagattatggcgtacaacaattcaaaaaaggctttaacgcacacgtcgaagaatatattggtgattttattaaaccaatcaaaccattactatataaggtaaaaacgtacttaaatcataaacgtcgttaaaatatcgctccaagatcatgaaaacataacaaagaaccacgcatcatgtatatggcatcatcgccatactaaaacatgatacgtggttttatttgattattcttcatttataacatttaagaaacgtcttaattcttctgttttcggacgattgaacatctcttctggagccccttgttctccgatcatgccttcatgaataaatacaatgttattagatacttctttagcaaaacgcatttcatgtgtcacaatgaccattgtcatgccttcattagccaaatctttaataacctttaaaacatcattcacaagttcaggatcaagtgcagatgttggttcatcaaacaacatcactttagggttcattgctagtgctcttgcaatagcaacacgttgttgttgaccacctgataatgcatgtggacgttgatctttgacatgtgttaaaccaactttctcaagtaactcaagtgatttcccacgtgcctcatcctttttcaactttttaactgtgataagaccttccattacattttctaatgccgtcttatgcggaaaaaggttataactttgaaataccataccagactgtttacgaacttctatttgtgattttttatctttagatgtatatgttttgccgttaacataaactgtaccttcagttggaatttctaacgcattaatcatacgtaacaatgttgttttacctgaaccagatcgaccgattaaggttacaacctcaccttgttcaacagataaatcaatacctttgatgacttcaacatcattaaatgatttatggatattgttcaattgaatcatgagcgataccctctttcaatataagattcatagataccttggataattgaaataataaagcataccacccagtacattagcgcaactaacacataaattgttaaatattcatatgttgtagacgcaacttcttgagcttttctaaacatttcagccactaaaataaatcctaataatgatgtatctttgattaaacttaaaaatgtattacctagtgcaggaatcgacactcgaattgcctgcggtaaaatgatacgttgtatcgtttgaccatacgtcataccgatagaatatgcagcttctgtttgtcctttcggtatagaaataataccgccacgaataatttccgaagcatacgcacctacatttaatgataaaccaataatagcagccactacaggtgccaatgtccattggttgtcagcgtcatttgttaataacctacctaattctggaataccataaaatatgataaatagttgtactatcattggtgttcctcgaataatagatacatagacacgtgaaatacttcttaaaattttactcgttgaaattcgcattaatgctgtaaataatgcaataatcaatcctaaaacaaatgtaactaatgtaataggaattgaatatttgaccaaaccttctagcataggtccgaaagcttgttttgcagcatctagcgcatgttgttgttcgctatttagatttagaaacatcttgaccaaaccatttcttacctattttagctaattcaccgttttcctcgatttttttcaagccatcattgaatttttgaactgtttcatcatctgcttttttagaaaatgcaaatgcagatctactttgttcagcattacctttgattgctttgatcttagcattaggtttttgttttttataatccaagtatgacagactatcattaaatgtaccatcaacacgcttagacaataataaatccattgattggttaaagccatcaacttttgtaatatcagcacctttatccttagctaatttaccataattagatgtgaatgtttgtgctaacttcttacctttaacatcatcaaaatctttaatatctttttcattttcacgaataactaaaacagcacttgagaatgtgtaaggcttagaaaatttatatttcttttctctatcaggattaatacctacttggttcgcgattacatcaaaacgccctgcgtctaaacctgcaaacatagaatcccaagaagtttcattaaatttaagttttaaaccttcttccttagctactgctttaataacatcaatatcgtaaccagttaatttaccatctttatcatggaaactaaatggtgcataagtcccctcagtaccaacattaattgtcttgctatctttattagcttccttgtctttcgacgaattgtttccacatgcagccaatatgaaaacgaaagctatcatcacaaataaaagtcttttcatagaatatatctccttattcttattattctaatcggaataaaaatattttaatctgaaatgccggataagtcaatatgttgaacttttgctaaaaagctttatatagctagcaacttatatttattgacgagaatcaacttcttttttcttcccttgtaacataaatgaacaaaagaaactaacaactgtaatcaataatgcaaataaaaatccagcgtgataaccatgcaacatcgtatcaactttaatttgattcatcatatcaattttgttcatgccattatagtctgacatagttggagaaaagtttttacttgcatgagctaaaatagtaattaatgcagctgttccgatagaaccagcaatttgttgtactgtgtttgtcatagatgaaccgtgtgcattcatttctggctttaattgattcatcgtatgggtcattactggaattaatcctaacgcgataccaaccattcgaatcgcataaaccgttgccaacatgattgttgatgtttgttcatccattacaacaaaataagccgtagtaataacaacaatcgccatacctactaaagcaagctttctaggaccaaacttttcatataaagcacccgaagtcatcgacataaatgccataacaattgctcctggtaataaagttaacccagaatctaaagctgaacgatgcaataaattttgcacaaaaataggtaaaattgtttccgaaccaatcatcgataccattgtgacacccataataatgataccaactgtaaattgtttatttttaaatactgcaaaatttaataatggtgttgatagccgatattgacgtaatacaaataatgcgactaaaacaataccaccaatcatagatactaatacgataggattatcaaaacctttttctgaaattgaactcgttccatacaataacccgccgaaacctagtacagaaaaaatgacagaaataaaatcaataggtactttaattgtagttccaacattttttatcgttttaaatccaattaaaaatgtcacagctgcaattggagcgacaacatggaaaagtgatctccagttaaaatattcaacaagataacctgaaagagtaggtccaatagctggtgctaagccaattaccaaaccaaatatccccatatatttaccgcgttcatgcggttggaaaacatccaaaattgttgtcatcatcaatggcatcataatacctgcacctaacgcctgaataattctagcaactaataatgttgcaaagtgcggactcaaaccgccgagtaatgtacctaagaaaaagatagaaatacccactaaaaacacttgtcttgttgtataacgttgtataacaagcgcggacaaaggaataacaattccattagtcaataaaaaagctgttgtcagccattgaacttgtgtatatgaaatttcaaaatctttcataatacttggtaaagccgtcactaatagtgtttcatttaataatccaaaaaatccacccatcagcatagtaataatcatcgttaatttttgtttcttcgacatttaaagcttccccctcaccatctaaaaaacgacactcatttttagatatccggtaattatacccattttcaaaaaaattagcacgactttattacaatttctttaaaacgtaatcattactatttacatatgagtaattatcggtcataatatatttacaaggagggatagagatgaaattagatttacagactgctcgtcgtaatttaaatagccctaacattaaaacaagaaagcgtgctttaaagattattaagcaacataaaagagcgaaataattgttttaatttgactatattgtatgtctaactatattttcgagtatccctagctcgttaatataaactctatacttaactatttccttacattacttcacatatttaagagctgcatatacactcactccttgtgtacatgcagctctttttttataagtagtatttatctataacttctaaatcatccgttaattcataaacaagtggtgcacctgttttaatttcataattaatgatatcttcatctgacacatcttcaagatatttaatcaatgcgcgaattgaatttccgtgtgcagaaactaataccgtttgaccatctagcaaatattgtgaaatatgatctgtccaaaatggtatcactcgaactaaagtatctttcagactttcagaataaggcatcatacgtttatctaaatgattatatcgacgatcagctaagtaagcttcacgttgttcttcggtttcagcaggtggtttcacatcataagaacgacgccaaatatgtacttgttcttctccaaattcttttctagcatcatctttatttaagccttgcaatccaccatagtgacgctcatttaaacgccagcttttatatacaggaatccattgttgtttagattcagttaaaatataatgcgttgtatctaaagcacgtgttaataaagatgtaaaagctacatcgatggcaatgttattttctcttactttttcacctgctctagtcgcttcattaataccttgttcagataaattaacatcttcccatccagtaaataagtttttagcattccactcgctttgtccatgacgacataaaattaattttggcataacttataacctctttcctttaatctttaggacgttatttcagggatattttaagatgatttaatcttagtaattttcttttcaatatgttttaaaattcaatgattaaatcaattatcactagacattaaatacataaatcctattccccattttcattttttaattcataaatgaatcaataaccacctaataacaaatcatattatacacctttgtccgtcatttttctaaggtttgaaaaatatttttaggcgtacctaaaaaataaatgtattaaaaacgcctcctcagatatttatatatctatgaagacgtttaaatacattatagatggtctggttctgggtgaacgtatactgaggaaataccttttttgtgcaaatgatgttcgacattgtcacaaatttgatgcgcttctactaaggaaaggttagcatctacaacaattgtgacatcaataaacacactacttccatggtaacgccctttaatacttttaacttcttgtacttcatcaacttctaaaatatcattgcgatacgcttctaattcagtttcattgaaaccatcactcaacataaaaattgcttctttaaaaataccaaaaccagtataaacgattagtaagcctagcaatgttgctaaaataatatcgacaattgggaaaccgatttgcgtaaaaattaatcctatcgccgttccaatgctgactaaactatctgataaattatctttggcagcagaatttaaagaactacttttcgttcttttcgctaggctttgattgactgcaaatacaatcaacattataagaccactgattaagctgacgataattgttattgcgttaggtacaacgtcatcttctttgaacaaacgaggtgcattttgaataactacttggatacctacaaacataatgacaaatgacaccaataatgaagaaatattttcagatttcagatggccataaggatgatttcgatcagcaggtttaattgaaattttcaatccaataataacagctaaagaaacaataatatctgtcatattgtttaatgcgtcggctcttacagctgcagagttaaagacaaaacccgtgacatacttaacaatagataagattatatatacaattaaactcaaataagcaccgcgttgcgccaatttaagattttcattatgagacatgcgttgaaccaccttgaattagtatagtaacaatattatgaatgatttattttaaatttacaacgtttttaatttttataaatttttataaaattaaactaatttattcattcgcaacccctaaaaatattttttagcctttctgcgaattttatgagctagaaaggcttatgcattagtagcgaagctatctaatgcgttcctctattttcttcaaatttatttgttagaaaggcttatgcagttgacgttttacgtcctactacgttcctttgtcttcttcaaatttatttgttagaaagatacccaactcttcctacttgttaactttcgcctcgaaagtttctatgttgggaccctatgcatgagttgcgattctatctaatgtcgtgacctaattatatagaagaaaaagtgcatcagtgacaaattaaatgagctttttactctaccaaactctcttcgaaagacaattttctcctctatttattagcaaactattgcatttatccatatagtacttccttacttaaaatacgctgaatgttctgaattaaacgcttttttacatagttaacactagttaatctattagttaacattagttaataattagttaatttccatttgtattctcatgtgataaattctaaaagcatacaataaatttaatatgtaaaaagaaagggaatacacatgaaaaataaatatatctcgaagttgctagttggggcagcaacaattactttagctacaatgatttcaaatggggaagcaaaagcgagtgaaaacacgcaacaaacttcaactaagcaccaaacaactcaaaacaactacgtaacagatcaacaaaaagctttttatcaagtattacatctaaaaggtatcacagaagaacaacgtaaccaatacatcaaaacattacgcgaacacccagaacgtgcacaagaagtattctctgaatcacttaaagacagcaagaacccagaccgacgtgttgcacaacaaaacgctttttacaatgttcttaaaaatgataacttaactgaacaagaaaaaaataattacattgcacaaattaaagaaaaccctgatagaagccaacaagtttgggtagaatcagtacaatcttctaaagctaaagaacgtcaaaatattgaaaatgcggataaagcaattaaagatttccaagataacaaagcaccacacgataaatcagcagcatatgaagctaactcaaaattacctaaagatttacgcgataaaaataaccgctttgtagaaaaagtttcaattgaaaaagcaatcgttcgtcatgatgagcgtgtgaaatcagcaaatgatgcaatctcaaaattaaatgaaaaagattcaattgaaaacagacgtttagcacaacgtgaagttaataaagcacctatggatgtaaaagagcatttacagaaacaattagacgcattagtagctcaaaaagatgctgaaaagaaagtggcgccaaaagttgaggctcctcaaattcaatcaccacaaattgaaaagcctaaagcagaatcaccaaaagttgaagtccctcaaattcaatcaccaaaagttgaggttcctcaatctaaattactaggttactaccaatcattaaaagattcatttaactatggttacaagtatttaacagatacttataaaagctataaagaaaaatatgatacagcaaagtactacactgataaatattttaaatataaaggtacaatagataaaactgtactatcagtttttggtaatggatacaaatcatacatccaaccattaaaagttgaagatcaaaaaaattatgtatctaaatcatatgcacaagtaagaaactatgtaactgaaactttaaacacaggtaaagtattatatgcattttatcaaaatccaaacgtagttaaagctgctataactacagctgaaacagcagcatcaatcaaaaatatcttctctagttttacatcattttttaaataattttcgtaataaaccgtgattaaaaagaaccgttgattctcaatcgaatctgcggttcttttttttattttccatcaattaaatgtttcttcgctatttgtcagcccacttttttacctgcaacttgttaaataatccttacatcgttaacgaatagttcatcatttagttgaatcatctcaactttattaacttcaaattttcacaaactattgcgcaatctattcctctaccactacaagcaccataattaaacgacaatttaattgaataagacttgcaaaacatagttatgtagctatataaacgcctgcgaccaataaatcttttaaacataacataatgcaaaaacatcatttaacaatgctaaaaatgtcccttcaatacatgttgatagtaattaacttttaacgaatagttaattcgaaaacgcttacaaatggattattatatatatgatcttaaaattaaatagaaagaaagtgatttctatgattaaaaataaaatattaacagcaactttagcagttggtttaatagcccctttagccaatccatttatagaaatttctaaagcagaaaataagatagaagatatcggccaaggtgcagaaatcatcaaaagaacacaagacattactagcaaacgattagctataactcaaaacattcaatttgattttgtaaaagataaaaaatataacaaagatgccctagttgttaagatgcaaggcttcatcagctctagaacaacatattcagacttaaaaaaatatccatatattaaaagaatgatatggccatttcaatataatatcagtttgaaaacgaaagactctaatgttgatttaatcaattatcttcctaaaaataaaattgattcagcagatgttagtcagaaattaggctataatatcggcggaaacttccaatcagcgccatcaatcggaggcagtggctcattcaactactctaaaacaattagttataatcaaaaaaactatgttactgaagtagaaagtcagaactctaaaggtgttaaatggggagtgaaagcaaattcattcgttacaccgaatggtcaagtatctgcatatgatcaatacttatttgcacaagacccaactggtccagcagcaagagactatttcgtcccagataatcaactacctcctttaattcaaagtggctttaatccatcatttattacaacattgtcacacgaaagaggtaaaggtgataaaagcgagtttgaaatcacttacggcagaaacatggatgctacatatgcatacgtgacaagacatcgtttagccgttgatagaaaacatgatgcttttaaaaaccgaaacgttacagttaaatatgaagtgaactggaaaacacatgaagtaaaaattaaaagcatcacacctaagtaaacagttcaatcattttataaaatcctgggacacttcatacttgtctcaggattttttaacatattgaatcagcctcataacattaaattattttatcgtacattaaatttaataataacaactgatttttataagaacaaagtatcgcgccatggtagatacacaaataatacagatgaagcaatttaacttgaaagcttaaataaatattctcaagttaataaataattaacttttatatggattcatcaaaaatcgcaaaaaagaacaatttgtattttacaaacattaattaaaaataaaagtaagatattcgtgcaagcggttaccttaatttgtttacaactgtcaacaataccaaggctttatcaactatacttctcacaaaactgtcttttagcattccaaacaaaaaaggttaaattgaacggaattatggcatttttaacttaattgtaaaaaagttgataatggtcaattgttaatgaatagttaattataataactttcaaaatatattatcatttaattaagttaaataaaattatagaaagaaagtgaaacttatgcttaaaaataaaatattagctacaactttatctgtaggattacttgtccctcttgccaatccgttattcgaaaatgcaaaagctgccaacgataccgaagacatcggtaaaggaagcgatgtagaaataatcaaaaggacagaagataaaacaagtaataaatggggcgtgactcaaaatatccaattcgactttgtgaaggataaaaaatataacaaagatgctttgatattaaagatgcaaggatttattagctctagaacaacatattacaactataaaaacactaatcatattaaatctatgcgatggccattccaatataatattggtttgaaaacaaatgataagaatgtttctttaattaattatttacctaaaaataaaattgaaactacaaatgtgagtcagacattaggatacaatatcggtggtaatttccaatcagctccatcacttggtggtaatggatcatttaactactcaaaatcaattaattatactcaacaaaactatgtgagcgaagtagaacaacaaaactcaaaaagtgttttatggggcgttaaagcgaattcattcgtcactgaatcaggtcaaaaatcagcatttgatagcgatctatttgtaggttataaacctcatagtaaagaccctagagattattttgttccagacagtgagttgccgcctcttgtacaaagtggttttaacccttcatttatcgcaacagtatcacatgaaaaagggtcaggtgacacaagcgaatttgaaattacttacggaagaaacatggatgtcactcatgccattaaaagatcaacacattatggcaatagttatttagatggtcatagaatccataatgcatttgtaaatagaaactacactgtgaaatacgaggtcaattggaaaactcatgaaatcaaggtgaaaggacagaattgatatgaaaatgaatagattagtcaaatcatccgttgctacgtctatggcattactattactttctaatactgctaatgctgaaggtaaaatcacaccagtaagcgtcaaaaaggtcgatgacaaagttactttatacaaaacaacagccacagcagattctgataaatttaaaatttcacagattttaacattcaatttcatcaaagataaaagttatgataaagatactttagtacttaaagctactggaaatattaactcaggctttgaaaaacctaatcctaatgactatgacttttcaaaattatattggggagctaaatacaatgtatctataagctcacaatctaatgattcagtaaacgtcgttgattatgcaccaaaaaaccaaaatgaagagtttcaagttcaaaatactttaggctatacattcggtggtgacattagtatctctaatggtttatctggtggacttaatggaaatacagctttttctgaaactattaattataaacaagaaagttacagaacaacattaagtcgcaacacaaattataaaaatgttggctggggagttgaagcacataaaattatgaataatggttggggaccttatggacgagatagcttccacccaacatatggtaatgaactcttcttagctggcagacaaagcagtgcatacgctggtcgaaacttcatagcgcaacaccaaatgccattattatctagaagcaacttcaatccagaatttttaagcgtactatctcatagacaagatggtgctaaaaagtctaaacttactgtaacttaccaacgtgagatggacttataccaaattcgctggaatggtttctactgggcaggcgcaaattataaaaactttaaaacaagaacatttaaatcaacatatgaaattgattgggaaaatcacaaagtaaaattgttagatacaaaagaaactgaaaacaataaatagctagtaaaacacggtcgccaacagtaattgtgacgaccgtgttttggtttattatcttagtaagactgccattctttttctcaatgtgagatataaaggaatagctacaattaaagtgaatattacgcctggaatcgcgtttaataacactacccacacaggtaaatttaaaataatagataatagtagcctagataccaaactgcctaatacacttgctaaaactaatgatagtacatttattttcaataaataaacaactgcaatagctataactctaaatataatagaaataatcacattaattggattaaatacgccaaatatcagcaataatacgcttgataaaagcccacctaaaaagtactttttaattccaaagaaagctaatattaataatgctgccggtgcagataattgaaaatctaatcctggtataatggatggtattttcaaaactgccaaaatggttaaaatcgcagcaatgacactaatttgagtaatatcttttgatatcatactaaaacccctataccgtttcataaacaacttgcttcggtgtgctttctaaaaatgatatgtaatgatttaaatcaatacgatcgtccacaaatattattctgcctccatatctcgtattaactggtttaatatcaaataatcgatggtaaccaattttagcagaggcaaaataacctgttgtatacgttaagtcatcggacacgcaaagttctcctttgacatatggatgcgcattgatacaactagcaattgctaaggcatcagtcactctttcattaagatcacctttattatttatatcttcaaacgaaaaatgcgttgccctaatccccctttgtccaaatgaatctaaacgtttaccagatatagcagatagaataatagctcctgtataaaccgtttcatttttaatatatgtcatcccttgatttagcgcttgttcagttacaccacattcttgtgttaaatgttggagatttactttatcatcctcaataatttgtaatgcttttatttgttgaatcggttccataattttttgtatttttatattgagaaaatccggttgcccattttcatgaaaaaaacctttattataaaacctttgtaccgtctgttctattttgtcaaactcacaaatcgtttcagcaccactaatatgaacatcttgattgctagaacgcatttttatactatacatgacgatcacctcaatcttcttgatgcaaaatttcaaacaacctatctacatcttgttcagtatgaaaatacgacaatgatattcttaacattggcttagtcacagttggataccttaaataacttgtaaacacatgatgctttaataatgtttgatgaatattctcagccgcttctatgtcatcaaactcaataaacttaatcggcgagtttgaactattataattaacattgagcgcttttaacttttggttaaaatatttactcaaactatttaatttagtgcgtctatcatcagcatttattaacttttcaatatttctttttataaaatacaaattataaattggcaaactacttgagtagatgagtggtctaccgtgattaattaacatatccttcacatcatttgaacttaaaatcacacccccgtatgcaccacatgctttagataaactagaagtgagtatatctataccttgataattcgagtaattctctattccaaaactatgtgaaacatcgagtatcagtgttgcgttatatttatgctttaatgagactaattgaccaatatccacaacgtcgccattcgttgaaaatacactatcagatatgattatttttggtatattttgattagggtattccgctaaccttttttctaaatcagcaatatctaaatgcttatatatcactttttctaaaccacttaacttaataccgtcaataatactcgcatgattttcttgatctgaaaacacgacacaatttgtatttttgaaaatattaaataacgccaaattagcatcataaccactatttaagatagtacatgcactatatccgagccaacctgctaacattgtttcaatttcttcataagttgtcgaacttccactaattaatcttgaacttgataagtgataactatacttccgcataaatctttcgaaatcatccttatcaaacgctatttgtcctaatcctaaataatcattagatgtataattcgtacatcgcttattttctacttcaatatactgtctatctatataccctaccgatttaagcgaccgatataaccctttctgttgtaataaatcaatttgctcttgaaacatcattcttgttttccttattttcacaagtgccataatcaatttcaaagcccaaatcattaatcatatcgtagtctaattggttcggttgcccaccagtaattagataatcaccgacaaatattgaattcgccgcttttaatgctaatggctgtaacgaacgtaagttgacctctcttcctccagcaatacgaatttctttcgtaggattgattaatcggaataatgctacgattcttaaacatttcattggtgttaaatcatccatgcttccaaactttgtgcctttgattggatgcaaaaaattaatcggaatactgtcggcatccatttcttttaaagcaaacgccatatccacaatatcttgattagattctcccataccacaaatcacgcctgaacatggtgagatattattcgctttcattagttctatcgtatctgttctatctttataactatgcgttgtcacgacgttatcatggtaattttcacttgtattaatattgtggttatatctgtctacaccagctgacttaagtttcttagcttgttcgtcattcgttaatcctaaacatgcacatatttttagttgcgggtgttgagatttaatcgttcttacagtgttactaatatgatcaacttctttatcgctcggtcctctaccactcataacaatacaatatgttccaatatgattatcatgtgccacctttgctccatcgataatttgttcctctggaattaaagcatatcgctgtttttgtttaatatctcgtgattgtccacagtacccacaattctcgggacatataccacttttagcatttaaaatcatgtttaattttacttttttaccgaaataatgttttcttaaaatatacgcctcatttaataaatctaaggtatcaatattagtatcctcataaattttcaatacagtctcttttgttaattgttccccttgtaatatgtgtttagccaaattcatattaacacttcctatctaaaatgttatgtactgcctttttaaaaatacgtaccatcgttttcacttctttatttgacatacttaacactggcacaaacgtaatgacattttctaaatttctaatcattagcccgttttctttacaattacgtacaatacgttctactttttcaatttctaacggcgttttactatctttatctgtaactaattcaactccaaacattaagcctcgtcctcttacatcaccaacatttcgatgacgcttcagcgcatgtaactgtttctcaagtgttgatgatgtcgtttcaatatgtgacaataacttacgtttttcataaagtcttatattttctaatgcaaccgtacaaacgatttgatttccggtgtatgtatggccatggaaaaaggtattcacaccatgcgaatcacttaaaaatgcattgtatattttttgagacgtcaacgttgctgcaagtggtaagtagccacctgtaattgccttgcctaaacacataatatccggttgaacatcttcatgattgcatgcaaacatctttccagttctcccaaaaccaactgctacctcatcacaaattaataagacatcgtattttttgcacaatttctcgacttctttcaaaaagcctttaggatgaacaaacaagcctgtcgcaccttgaatcaacggttccaatataaaccctgcgatttcatcatttctttcaattagaatttgctctatattcgttaaaatagctgccatcatttcattttcagtatcgtaattactgcgatagaaagatgggctttctacttgaatattctcaaatattaagtctttaaatattttatgaaaggtcttgataccaccaacacttaccgcaccaatcgtatccccatgataaccgtgatttagcgttataaacttgtttttcttggcatatttttctctatcaatatttttccaatactgatatgccatctttattgcgatttcaacagacgcactgcctgtatcagaataaaatacttttcttagattactcggcgtgatttcgtttaatttttccgcaagttctattgatggaatatttgatgatcctagcagcgtagaatgggcaattttattgagttgctttttaattaccttattcaagtatttattattatgaccatgcacattgacccacaacgatgcataaccatctaaatatttattgccattcgtatcgtaaaggtaactaccctttcctttttcaatgatgattgcttcttctttgctatatacacccatttgtgtaaatggatgccaaacatattctgagtctttttgtttaagttgttgtgtgtaattcatttttaactcctattaattgttttaaaaatgcttctgagaaattttcatacgtggcatgttcttcaaatgtatagactgttttatttgttaattttccaatcgtcatttgattgtcgttttcaatatagctgtctgtatagcgattcattattaaaaaattactcgccgatacattatgattaacataatcttggtgaacaatggcatcgctaatagcacctaattttgatggcaacacactgatgacacaatctgcacaatcattgattagatctttagtcatgtagaaatcatctgtaccttcatatattggtacgccaattcccccagcaccctcaattaagataaaatcaaattccttatctaaaacttttaccttatctaatacacgctgcttatttagaaaaatttgatctgccattttaaatgcaaggtgtggtgatacaggttgcttaaaagtataaagtgacgttatgtcatagcttaaatcacattcatttttaaatacttctaaatctggaaacgtcccgtctttgcgttcctcagtttgaaatggtttaaaaacacaaacacgatgaccacgtcttttcaaagcatggtataaatgctttgtaacataggttttgcctacatcagtattcgtacttgtaataaaaatcctcataaaaattaagcacctcaatccaaatgtaaacttttataattaataagtttacatttaaggcgcatgtttttcaagaaaacatgaatttaaacttctcagtataactataaattttggcaaaattttgaccttgctattgaaatgactaaggcttcttacggaattcggacagatataaacagcgattcgataaaatatgtcagttaaaattaataattgcattatttcttaataaaaagacatcctagctttaccatgttgtgaaacaattcattaattgtaatattacgttgagcgccttgttcatcaatgctataattagttacataataaattgaacatctaaatacaccaaatcccctcactattgccgtagtgaggggatttatttaggtgttggttatttgtcaccttttttatttccaaattctgattccatattaaactattatttataatttccagcctgctgacttactttttattgttataaaatcttgatacatccctggtttttgaattaattcatcatgacttcctctttgtattatttcaccatcacagagtacgataatttgatctgcatttttaatagtttctagtttgtgtgcaattgtaataaccgttttgcctttactcaattcatcaattgcatgttgaatgagatgttcgttttcaggatcaatacttgctgttgcttcatctaaaataataattggtgcatctttcaaaattgcccgggcgatagaaattctctgtctttctccaccagataaattattgcctttttcatgtaatactgttttatatccatcaggtaacttcattatgaaatcatgacaacatgcctgttttgctgcacgaataacttcttcttgcgtcgcatctggattaccaaataatatattattttcaatcgtatcattaaataaatacaccttttgaaatactgcactaattttcgacattaacgtacttaatgtcatatctttaatatcaacaccatcgatgcgaatatttccatcatcgatatcataaaagcgcaagagtaagtgacataatgtagatttcccacttcctgaaggtccaattattgctgttgatgtttgtgtaggtatctcaaaattcacattctttatcacttgtttatcatcatatgaaaaattcacgttttgaaaagcgatattttcattttcaatcgttaaatctttcccctgcttatctaactctggcgcactttttatcttttcaatgtcttctaatgtcatatcaattatttcgagtacgtgtgctgcactattaatgttttcaacactatcaaaaattacaaatgaaaaaattgaaatcataatgaatgtaggtaaatcaatactattatgtataaataataagcatgcaactaacacaattaatatcgaagtaactttcaaactaagtaaatgtagtaaattaaatggaatgtactgcatttcaatttttgtattaacacgtttactctcattaacagctcgattaaaacttctaatacttgcattttctttcgagaatgatttaatcacttgaatgccacggataacttctaccactttttcaattaattgattttgtgcataatgatacgttggcgcattttttttactcttgttttccaataattgaatagctaaaaatgataataatacaccaatgcatgctaataatgctacttgccatgatacgaccaataaagacaagataagtactgaaattaatatgtatccattaatgacaatatccaccattttcatggcaaagttttctagaaatgttaaatctgtagtaacaatagttgttaactcatttgagtgatgcgtattaaaatatcctaaaggaacgttttttaatttattaccaatatttaaacgttcattcgcactcatttcataagcaatactctcctgatttttacttttcaaatatgctgtaataaaccgaccaagcactaatataatcatgatgattacaacattaaaaatatcttttccatatatagatttattagatactacattattaaatatttgtgaagccaaaaaaataggcagtgcaataaatattgcatttaaaaatgacatgataaatcctaaaaccatccttgttttatatggcgatacccaatttaaaatcttaaatgtaatcctaaacatgtttaacctcctttactcatcaacttaattactttcggtattgataccccagtcttttgtatgcatatgcatatcccacatatttttgtaatgagcttctaattttagcaacaattgatgtgagcctttctccaaaatttgttgattacctaatacaataatttgatctgcatgttgaatagtagataaacgatgtgcaataactataagcgttttattgcgtgtcaacacatttagtgcttcttggattttttgttcactatctggatcaacgtaagcagtcgcttcatctaatacaatgataggcgcatcttttaatatcattcttgcaatagtgactcgttgtttttcaccaccagacaatttatctcccactgtaccaacattcgtatcatatccatctggcaacttttcaataaattcatgacattgtgctaacttggcagctttttcaactgcctcatccgtagcttctggattgccaagtttaatattttctttaaaagtaagatttaataaaaagttatcttgtcctacataaccaactaattcgttaagttgcttttgttctatattttttatgtttacattaccaatcgtgatttctccagtcgttacatcccagtaccttgatatgagcttagctatagttgacttaccgctaccagattccccaacaatcgccgtaaaatgattttctggtaccgtaaatgatagattcttaaagactctttcgtccttatcatttgtatatgaaaaacccacattattaaaagcaatttcataactttgaggttccataaatcgtgatgacaatgctaactcttctaagattaatatttgatttacttcagttaacgcatattggattgattttaaatgattcacataattagtaaaattcttaatcggtgctacgacaccgagagataatacaatacaaataaaaaattctgcataatttaattggttgatagatatcaagtacatgccaacaggtagaatccctaaaaacgtcgaaggtagtacacttgcacctaaattcatatagccccatgtatttttaaaccaatttaaagtatgtattttataattatctactgcatcttgatattttttatacgagctttgagattgattaaatgttttaattacctcaataccttcaatatattcaacaatggcgctattcatataattattcgatttcatttgttcagcatatgtctcattaaatccagacataacttttttaaaagcgaaaattgaaattggtatcgttactaataaggcactagccatacgccaatcaatgagcattatgtataaaaagatagcagctgacaaaagtaagtttcctataacttcaggaatcatatgtgctaaaggtaattctattgtttcaaccttatcgacaaatatattttttaattcacctattttcttagattccactacgcctaaagggagacgcattaatttttgagctaattttttacgaatttcagataaaatttcatatgccgtaatatgtgatagcatcgttgacgctccaaaacaacacacttgtgaaatataagcgattaaagcaataaagatataaaccataatcgaattaatcgtatatgcattgttaatcatcattaaaataattttaaagactgcccaatatggaactaatccagaaaagacactgatgatagacaacaaaattgataacataattttccatttactatcagaagcaaatccgctgagtatctttatccaatttgtctgattgttcatcgtatatgtaactcctttcaattaataatctaaattaagccgcttatattatttatttcactggatgatatacataatataaatttgttatttgttaaaaattaatacttattacaagtacatcatatattagttgataacgattatcaatgtcgcgtggatttgtgacacatttcttttaaaaattcacaatgttatggggcagaaatgataaagagccactaatgatttattatgtaatgattctttatccttagccacagctaatatgtacttaaaaataggaatacatgagtaaaactctatgttggggctccgccaacttgcattgtctgtagaaattgggaatccaatttctctatgttgggtccctgagtatagccttgtagagtctagtacattgatttgtatcccaatgtccctataattgattattctctttatctaatgatcctatgactcaactattaaatcatttttcaaaatacttaattcaaatataattaaatccattaattgtaatattgtaaaaatacattgcacaccttgttcatcaatgctataattagttacataataaattgaacatctaaatacaccaaatcccctcactactgccatagtgaggggatttatttaggtgttggttatttgtcaccttttttattgttgcgcgttcgtaaccaatgtgcaaaaaacgcaacaagacagccgcttaaagctgaagtcatgatgtcaattaataaattgaacatccgtcatacacctcctctctgcgttaaagtaacgcccgagatgttaggcgaccattatattatatcatttatttattatatttcacgcaatattaaagttcgagtaaagcgttttttagtggtttacgctactttaattactatcttttaaaatccatttagataatataaatgtgatgggtatcgtaataattaaaccagcaaatggtgcaatttctgctggcaaatttagccaggatacaaatacatataataaaactgtttgtaagcttacgttgacaatctgcgtaattggaaaactaatgaattttctccaagtaggttttaccctgtaaacaaaataacaattcaaataatacgaaatcacaaaagcgactataaatccggtaatatgactaatcatatattcaatgtgtaataattttaacagcaataaatagacaacataatagtttaacgtattaatgccgccaacaatgataaattttaaaatttcagcatgcgtttgtgttagtttcatatgtgtaactcctcaacatcaaaatatatgtataactgcgttctccaacatactcgaatatgcgagccaatccgcttctcttcaaatatacttatttcagtttttataccctttcacagcaaatttagtctctttcccctgatccttatacgccattataatgtaactgatttatcgcgcgactcattagcactatagagattactttagttcactagtaattttatatacaataagagcgacaacagtaatgagaggatgtctactatgcaattacaaaaaattgtcatcgctcctgactcatttaaggaaagtatgaccgcacagcaagttggcaatattataaaacaggcatttactaatgtttatgggaatacccttcattatgatatcattccgatggctgatggtggtgaaggtaccacagatgctttaatgcatgcaacaggtgctactaagtatacagtcatcgttaatgaccctttaatgcgacctattgaagcatgttatgcacgcgcagacgaacaacaaattgcaattattgaaatggcagcagcgtcaggtttggatttattagaaaaagaggaacgtaatcctttatacacatcatcatatggtaccggtgaactaattaaagatgcattaaatcatggtgctaagaccattattttagggattggtggcagtgcaacaaatgacggtggtacaggtatgctaagtgcactaggcgtaaagtttactgatgtaaacggggacttattacaaatgaatggtgctaatcttgctcacattgcacaaatcgatataaccaatctagattcgcgattaaaagaagtgacctttaaagtggcctgcgatgtttcaaatcctttattgggtgaaaatggtgctacctatatttatggtcctcaaaaaggcgctgatgcaaagatgataccaaagttggatttcgcaatgtcgcattatcatgataagataaaaatgtgcacaggaaagtccgttaatcaaataccaggttctggtgcagctggcggtatgggcgcagcattattagcgttttgtgagacaactttaacaaaaggtattgatgtcgtctttgacattacagattttcatcaaagaattaaagatgcagacctcgttattactggagaaggacgcatggattatcagaccatctttggtaaaacacccgtaggcgttgcgttagctgcaaaacaatatcatattcctgtcatcgcgatttgtggcagtctaggcgaaaattatcaacatgtttacgatttcggtattgatagtgcctattctataatctcttcacctagcactttagaagatgtcctacaaaatagcgaacaaaatttattaaacactgcaactgacattgctcgtattctgaaattacaataatgtcaaagtcaatcatcagctttattatttgcagttaaaacttgaatgaggtgaaacccatgaaaagaactgataaataccgtgattcatatcaatacgacaatcaaaaccaaaatcatcgtcgtcaatctgaagacgcatcgtatagacaacaatatgctaaaggtgatcctgaagaacacccggaacgatactataacggtagagattatcgaagagaacaaattcttgaagaagaaaacgagaaatcccgccgttcaaaaaaatggttatatatcattattgccattctcttaattattgtcgctatttttgtcacacgcgccttacttaacaatgatagcgataaagttagtaatgaccctaaagtctctcaaaattataaaaaacaagttgaaaatcaagacggccaaattaaccagcaagtcgataatgctaaagaaaatattaaaaacaaccaaaaaactgatgacattattaaaaatttacaaaatcaaatcgacaacttgaagcagcaagaacaaaacaaagctgattctaagctaactcaattttatcaagaccaaatcaacaaattgacagaggcaaataatgcacttaaaaacaatgcaagccaaggtaaaattgaaagcatgttaaatgatattaatacaaaattcgacagtattaaatctaaattagaaagcttatttaaagatgacaatggtggcgctaattaattattaaacctgcttttgatgataaacattaattccctatactttatttgtatcactacgttattcgtgatgatgcattaagagtatagggattttttatataaacttgtattctaactacatacaaatacacacaaaacgtatataatttatataattatatcatttaaaggagtctgatcatgcaatcttcgaaaaccaaaacgaagcatttttcatttttattgctaattacgttaggcgtcatgaccgcttttggcccactaactatagatatgtacgtaccatcattacctaaagtgcaaggtgattttggttctactacatcagaaattcaattaacattatcattcacaatgattggtcttgcactaggccaatttatctttggacctttatccgatgcttttggtcgcaaacgcattgctgtatccattttaatcattttcattttggtatcaggtttgtctatgtttgttgatcaattgccattattcttaactttacgatttattcaaggtttgacaggtggtggcgtcatcgttattgccaaagcctctgctggtgataaatttagtggcaacgcactcgctaaatttttagcatctttaatggtagttaatggcatcatcactattcttgcaccattagccggtggattagctttatccgtagcaacatggcgttctattttcacaattttaactattgtggcactcatcattttaattggcgtcgcttctcaattacctaaaacatctaaagatgaattaaagcaggtgaattttagtagcgtcattaaagactttggaagtcttttgaaaaaaccagcatttattattccaatgctattacaaggtttaacttatgtaatgctatttagttattcatctgcatcgccatttattactcaaaaattgtataatatgacaccccaacaatttagtatcatgtttgctgttaacggtgtaggtttaatcattgtcagtcaagtcgttgctttattagtagaaaaattacatcgccacatattattaatcattttaactattatacaagtggtaggtgttgctttaattatcctgacacttacattccatttaccactttgggtcttactcatcgcattcttcttaaatgtgtgtcctgtgacgtcaattggaccgcttggtttcacaatggctatggaagaacgaacaggtggcagtggtaacgcatcaagtttacttggcttattccaatttatcttaggtggtgctgttgcaccattagttggcttaaaaggcgaatttaatacatcaccatatatgattattatcttcattacagccattctattagtctgtctacaaatcatttactttaaaatgattaaaaagcaacatgtcgcataacacttcaacataattagaaccctagcaaagatatctatctttgtcggggttcttctttatgaattatgagatccaatcttcaactaaaattacgccttcatatcaagtacatttctattcaatcaccctttaacaggcatccaaatttctgtaatatatttttcacttgtagtatcaccatcctgatacaactcaaaaaatggtgctgattttaccttatctgcttgatattgatgtatgtagtgatgaacctcttccattttttgttgaactgctttaggtactgcgccctgtgcttcaaataccatatactttgaacttgctaatgttatgacatcatatttttcaatatcatcactattatctccggcaactgcaatcatatatgacatcttaccgtctaattcaggtatacataagccaagtatcccggctaaatcaccattattttttaactgtaaatccgcaagtactccctcttgataacatctttgccaaaatcctgctatatgttgctgagcctgtcgtccattttcatacgtttctttaatacctactaacgttaacgacgcaagttgttgtaattgatattccattttatcactccattaattttattcactcatgtaaaacatatgtttaggacattttgcattgacgctatataattatattaaatatttattgaatcaatgcgaggactatattatgaaccgaaaaatattaccagttaaacctatcagtcagctatttcctatccctatggtcatggggtgtgaaggtgtttccgcagccatgatgttgcaatacaataaccaacatatccctgctacagaaattatgagacattggccgacacatccgaacaatccacataaaggttatgttggacatcacttattcattaagcttggcaattatcatcaaacgatatttccagaagcatatgtaccatttttacaaaaatacaatcctaatatcgtagacggcactggtaaatccttagaagatcttaaaggtattatcgatcaaggccaacctgtgttaatataccatactaatcttggttctaaaccattactacgtgttttccgctttgataacaagccagcgaaacaagtttcaaatattcacgtaacgttactcattgggtacgatgattactattactattatatcgatccactttggagtcatattcgtcgtggcctagttttacctgccatcattccaaatcgcaaacaaattattaaaattcgtaaagagaaaatggaatatagctttaattcaccaggaagaaagtgcatttatgtgcaaccacattcatatacaattgaaaatcaacaacaaaataaacacacgtaagtaaacacattactcgcgtgtgtaaacataaaatgcgcaaactgggtcaggtttgcgcattttaaatttctattatttgtatcgtctcatttatttcctggtaaatatcttctgaacgccattgtcttggatagcctagacacggacagagataacatctgccatcatccatcacacttttccgaaaatgaacatggcccataatactatatggtatatcgaacatcgcatacaaaggattgaaatcacttgtcacaataaatgcattataaaaatcgaatatacgatgcagcataggaacaatgaaatcagggtgcgtcacaacatgtgtgactaaaatcactcgtctatttcctacttctaatatatctttcttcacttgttcagccgctattttagatagattttgatctgatatgccccaagatattcgttctttatcttgccaagtcgcaccataatgttttcctttttgtaactcatctaatgaaaatcgttgtgctgcaaagctataatcataccaacctgtatgtcctattattgcccattcttcatttactataaatggttttcctaccaagcactgtgaaatactcttataattattccaaatgtcttgcgtagtcatactttcaacttcccataaatcatggtttccaggaacaaatttcacaggtatatctaattgttttgttaattgcgttataaattggtgcgtcaattgataatgatttgagatatcccccgcaatcaacaatatatccaaatttttataattaactatttcaaccaatgcctctaagtaatcttcggatgtttttttattatgacgatcaatatgtaaatcagcgattgtccctatcttcatacccataccttctttactcaaattaaaatgttatttattatgccatagcttatctaatatatatagttaactgcttcatttagatgattattttatatttttgcataaaaacttatatcttttcaaaaagtcgataagttttagttatcataccgttacctatcaaatgttttttcttatatttaaaaaaataattgctttattaaatggatttctttagtatttataattaagaaaacgcttacacacaacttttttatttgctttatcctgaggaggaaaattatggcaagaaaattgcatagagagttgaataacagacacatccaattgatagcaattgggggcgcaattggaactgggttattcctaggatcaggtcaaacaatatctttaactggtccatcactgttattcacatacatgattattggggttgtactattcgcttttatgcgcgcattaggcgaattgttgttgagcaatacaagatttaattcatttgttgatattgcaaatgaatatttaggcccttttggtggatttgtcattggctggacttactggttatgttggattgtatcaagtatgtcagatctaactgcgatgggacaatactttgcattttggtatccacaagtcccaaattggattaccgtgctatttattgttttaatcttgattagcttcaacttattaggtgccagattatttggtgaactggagttttggttctctattattaaagttgtcacaattattgcgatggttatcgttggtcttgtattaatctttttctcatttaaaacacattatggacatgcatcattcacaaacttaatcagtcacggcggcatgttccctggaggaacatttggtttcttaatgtcattccaaattgctgtatattcattcattggtattgaacttataggtgtaactgctggtgaaacgaaagatcctgaaaaaaccttaccgaaagcaattaataatgtacctatccgtattttattattctatatcgggggtctattagtaattatgtcagtcataccttggaatgatatcgatccaaatagtagccctttcgttaaactctttacattaatcggcgtgccatttgcagcaggtgtcgttaactttgtcgtgctaactgccgcggcctctgctacaaatagtggtatctattcgaatagtcgtatcttattcggactgtcacaacaagggttaggtcctaaagttttaaataaaacgaatagtcatggcgtgccttatttatcaatgttagtctcatcaattgcattacttatagcagccttgttaaactacattttccctaatgcaattcaactattcatatacgttacaacgttatcaactgtgttgtttttagttgtttgggcaatgattattgtcgcttatctaatgtatttgaaaaagcatcctgaggcacataaaaacagtaagtttaagttgattggtggtaagcctattgcttacattattctagcgttcttcttctttgtattcattttattattctttagtgatgaaacaagagcagctatttatatttcgccattctggtttatatttttattcttcttttataaaaaatacaaagcgaatgctgaaaagctcgcatatgaacaacgacaaaatgacagcggtcatttcagatatgacaatcaataatttaaacatctcgctctagtatcagttcaaccgatactagagtttttttgaaaataacttcattttatcaatatatctatgtcattatgccttaaaagtgataaaatattaactattaaaattttgaggagtattgtatgccactattagaagcatttttaatttttatttttgctgtgattattagttcggttatcaataatcgattcccacaaattcctactgcctttattcaaattgcattaggtatcgttattttcattattccaatacaagttgatttccaattcaattctgaagtattcatgtttgccgttatcgcgccactactttttgtggaaggtacccacgtctctcgaacaaaattattagaatatcgtaaacctatactattaatgtcaatgtcactagtgtttgcaactgtagtcggtgttggctattttatacattggatttggcctgccttaccaatgccagccgcttttgcaatagcagcaattttatgtcctactgatgcagtagcagtatctgctattacacgcggaaaattattacctaaaggttctatgacgattttagaaggtgaatctttactcaatgatgcagcaggtatcatttcatttaaaattgctgttactgcattagtaactggtaccttttcattattccaagctgttgaacaatttatcatttcaacaatactaggtgtacttattggtgcaattattggattcgttgtcgttagaatacgtatagacttaaccgctaataaaggtttaaaagataacaataccttaacttttattcaattattaactccttttgtcgtatactttttagcagaagaagttcatgcttcgggtatcattgcagttgtaatcgcaggtctaatccatggtttagaacgcgaccgtttaattagagcacaaacggaactacaaatgaattaccatcaaatttggaacacatttagttatgccttaaatggttttgtatttgttgtattaggttttatgattccaactgtagtcatagatattttccaaacagagcctgacaacttttcatttttaatagtgatcactatattaatcgctattgcaatttatgcatgtcgatttgtttgggtttatttctggtacaaagatttttatttcccgaaaaatatacaatcttatctagacgaggaacatgattcacatgaaacaccaccttctcgtgtgcgttacgcatttattatgacgatgtgtggtattcacggtacaatttcactttcaatggcacttacattaccatttatcattacaaaaggacaagcattcgaataccgtaatgatttattgtttattgcatctttcatggtattaattagtttaatcttagcgcaaattgttttacctttaattacaccatctgccgaagatactacttttaaaggtatgacttatcaatctgccaaaattttcattgttcaaaaagtgatccagcattttaaaaacgaaagtaaaaaagacaaaaacgatacaaattatcgcccagtattaaaccaatactatggagaattgttatttttattaaattcagaacctgataatcaaaatacaaaagaactcaaacgtttagaagatattgcaaaagtaatcgaaacatctacacttgagcgtttaattgataaaggtaaggcaacatatcaggatataaataattaccgcaatattgtcgaattaacagagacacaccgtactgcttcatttgttgaaaaatttgcaaacttcttcaagatgttatggcttagacttaaagcgatgaagcactacaaagccttaaacaaagaatctaagaagcaagaatttgaaaattcattcaaagatgttcaaaaaattatgcgtattgtgaatcacaatattattttacgtttaaaagaagaacaaaatagtacaaatgtacttgaggttagcttagtcattaatcattactatgatatgagtcgctcattaaagtggcgtgcacaacgtcgaaaagaacgtcaagaaaacagcaatcaaatcataccgcaagctatgttccataaccacaaattggaagcattgtacttacaacgtcatcttttagatgaattaattcgcaaaaataaaatcaacaatatcgttgcagctcaaattcgagaaaatatcaattacaacgaaattgtcttgtctttacagtccaaacattaagcaagacataacaacacccccgtacatatgagacaaagtcattatcatctcatatgtacggggtttttatattcaacatcaaaaaatcggattgatgaaaagtaaataatctttcatcaatccgatttgattatagaatctattttttaagtttaaatggaattgtacatacgttaacattcttttgataaattaaatacaatttcatacgcaaactagtttgattgtgtaataaattatgccaacgtttcttagtaataaattctggtatcactactgtaatcatatagttttgatcgttggctttacgattaatcttatcgataaaacgtgaaattggtcgtataatactgcgatattccgagtgtaaaataactaatcttacatctgggaaatgacgtttccatttctcttggaatgctttttcatcttcatctccaaatgatacatgtactgctatgacatcattattcgcaagcatttgtgcgtaataaatagacttatcaactgctgttgtaatacttgttatcggcacaattgctaaattacgatctaccacgtccacattaagaacatcaatgtcagaacgtaattgttctgcgatatctcgataatgtttgttaattttcaagaagaaaatcaccacgaacggcaagaaaataagtatcggccatacttggctaaatttagttatgagtaaaatcataaaaacaataaatgtcacgataccaccaagtaagttcacagacaacttacttaaccaattcttaggacgttcatgaatccatttaataaccataccgaattgtgcgagtgtaaatggaataaatacaccaacagcatacaatggaattaaatcttcagtcataccatcaaatacaataattaaaataatggctaatacacctaaaataataattgagttagagtagcctaagcgatcacctctaacagtaaacattctaggcatatatttatctttagacattgaagccgctaacatcggaaaagctgtaaaaccagtgttagctgctaataccaaaatcatcacggtcgttgcctgtacaaaatagaaggcagcattatcaccaaatatttgcatagctaattgtgataaaactgtcgtttccgtttgtggcataattccataaacatatgctaaaccaacgataccaactaataaaaacgctaaaattgaacccatagcaattaacgtttttacagcattattagcacttggttctctaaaattggttaccgcatttgaaatagcttcaacacctgttaatgatgaagcccctgatgaaaatgcttttaatagcaagaataatgttactccaggaaccgcagttcctactgatgcatgcatatgtggttgaatatctcctgtcgccacacggaaagtacctataaatattaatatcactaaccctataatgaagagatatactggataggataatacggtggcagattcagttaaaccacgtaaatttaatattaaaataaaaagtacaagtaaacatgcaatcagtactttatgcccatataaacttgggaatgcagcaacaaatgcatcagcaccagatgatatactaacagcaacagtcagtatgtaatcgactaataatgagcctcctgcaagcaatccccatttttctcctaaattagtcttggacaccatatacgcgccgccacctttaggatatgcataaataatttgcctataagacataattaaagcagctaataagatcagaacagcacctgcaatcggtaaagtataccaagttgcaactgcacccactactgataatgtaatcagtatttgttcgggaccgtaagccactgaagataatgcatccgacgaaagaatcgctaaccctttaaacttcgatatcttttcgtcttttagttctctgttttttttaggttgccctataataagtcttttaaattgattgaacataatctcctattcctttttatactttttgatggatatcactatacgcctatctttccaaaaagtatagagagttaattaatattttttatgtaattatacacctattaacatataaggtgtcaaaaataatggtaaatatacctctttaattaatttattcaatagaactggtataataaaataaatctcattaggcacttaagtaaatttaacatataaaaaggaacgtttatgactactaaaaaactgtattttctatccatttctattatcattttagtcgccatttcaattgctatatatataacatttaatagcaatacgaagacacggttaaccaatgattcgcaacaacaaatagatacaattatcgagcatgatttacaaaagggacatattcccggagcatcaattttaatagtaaaaaatggcaaagtttttttaaataaaggttatggttatcaagatgttgataaaaaagtcaaagcttctcccacaacaaagtatgaaattgcttctaatacgaaagctttcacaggtcttgcaattttaaaattagcttcagaaggtcgattaaacttaaatgatgccgtatccaaacatgtgcctcattttaaaatgaactataatggtcaaaatgaaactattacgattaagcaacttttggctcaaacaagtggtatacctagtgatattacaagcgaagacgccgtaacaaataaaaataatcgtttaaatgatgtaacccatgcaattatgggtgatgaattacatcataagcccggagaagaatttgaatactcaaatatgaactatgatttattgggtttaattatccaaaacgttacgaagcaatcctatacaaaatatattacaaattcatggctcaagcctttgcatatgacccatacatcattcaaacaaaccaataacaaatcaaaacatgatgctattggctacgaattacaaggttcgacacctgtcgtctctaaacctgaatttaacctttgggatacaccatcagcatatatgatgacatcaactgaagatttggaacattggataaaattccaacttaatccacctgataaatacaaatcattagttcaacaatcacataaaaatttatcatcaacaattggtgaacctaatgccaatgcatatgcttccggctggtttaccaataatgatgaacatttagtgtttcattcaggaacgctcgataacttttcatcatttattttactaaatccaaaacaaaattatggaattgttgtgcttgcaaatctaaattcggaatatgtacccaaattagttgagcatcttaacacacaaattgtaaatcacaagcgatattcgacagttgcgtctatgctcaatcaatataaaaatcaatttaatattgttaccgttttgatgacaacacttattttattagcatttatattctcagcttatcgtgcttggcaaatgcgtcacgggaaaatcatcctgcgcaaatcaaaacttaccacatttttaagttggctaactttatgtttatgtatcgctatagcactcatattatatgcattaccatatctcattctcggtagcaataactggtcttttgtactgacttggctgccaatagaaattaaattaacgttaactacaacatttattgcattattcagtatgttaattacaattctgttagtactacatacaacgacaattaggaaaccataaaaaaaacttagttcaatcgcccatcaatccgaaacatacatatttatgtatgaggattagcgatttgaacaagtcttcattattaacatgctatatgcagaaatcgattatttaattggattcatgccatctttccaagttttataaatcagagtaccaccttgcgctttaaacttctcattgcttacgccacgttcaaatggttgcgcaggttgaatatcaatatttggttcaacaccaagttgttttttataccattctgcaaattcagaacctttaacaggtgcatcatctgctacattatagataccattttcaaaatgaatagcttgaatagatgtttcaactgcatcatcaagatgcacaaatgatgttacgccatctgaaagtgtcacttgaccatccataaattgattataaatcatgccatctttttcgtaccaagtacctgggccatataaccagccaaaacgtaaaacaacgtattcatccatacgagccgtttcttcttctagaccaaccacaccatcaaccgttacttttctatcaccagttgagttaaaatcaagtgaagttacctcatttgctaatccttcgccaggttcatacataaaggcaatactttgggcaattactttcttaacatcatgctttttcgccgcatcaattaaatttttagaaccttcaatacgtactttcgtgtttgctgccatatcaacattttttaaatccgtaatttggttgataatgatttctggtttaaaatctgctaacgcttgatcaatggtatcagcttttaatatatcaccaatatatgcttttacattaacagcagctagcttttgttgaccattctcagatgtagtaaaaccagcaacctcatgcccctcttcttttagtctttgaactaatttaatgccaataaggcccgttgcaccagttacaaaaattttactcattataaacaccttttctctatttgtcttttaatataattacttgcttgatgagtgtacaaaattcacgtgagacttccaaatgatttgcctcaaaatttttcaaagtgtcgtcgtaaaaactgtctagcaaatgctagtagtatgtcgtagacctatgacaaatctgaattatgacgaagaccaatcaagaaaaacagcaccaagatcatttcaatttgaaagtaccttactgctgttctttatttattacatttcaattttaataatgaccgtaattatcacgtgatagtcatttccttgcaatcatacctaaaaacactaattaatcctgtgcatgtcgctgactttctttagtatgaattaaatcagtaataaagcgattgactggcgcttcaatatgacgttgtttacctaatgttgcaactgcaccattaatataatcaatttcagtttttctattattaacaattaaatcttgatacatggatggataatgcgcaccaactttttcatttaaatcaactaaatattcaaatacttcatcaacatttaaatgaacattatcaatcgtcgctacatgcactatttcttgcgttaatttataaatcaaacacttcgcataactactttcattcagtgatgccatattacactccaacactgtgcttaatgcatttgccgtaccattaacacaaatctttttccaaatcgattggtataaatctttactaatgacaccattcaattccgcttcgttaagtaaatcagcaacttttataacattttctttaccttcatcaactagttcacctatttcaactggtccactaccaagtaaatgactgtgtccagggctttcaagacctgccgtccaagtcgtaacacctctgacaatttgtgattgagcaacatactgcgcaatgacttcttcatgcttcaaaccattcatcgtacatacgacaatcgtttcattatcaatatgtggcttcatagcttccatcacttcttttaattgcatagactttggaaatagaaagacaacatcgtaaatgctttcgtccggttgatcattaaaatgatacatcggaatgtttaactcgaatgcctctccattaatcgttatatttaatccatgttgcttaaccgcttcaacatgagatgtatatccgtcaataagtgtgacatcatatcctgcttgaaatagtttggcaccaaagccactacctaatgcacccgatccagcaattgcaattttcatcctataaacccctcttcatcgttgttgttcatttttaaaatactactttcgcatattagcgtcaatttgaaaatcattcgcttaatatacacacagcttttatcgtctataaaagaacacacctaacattaaacgtcaatacgcaacattaagtgtgtatgatatacttactttcacaaaatttcctttaaaatctctacataataacttgctttcatttcagttttacaaattcgtttgatttttaggaactaatagtaaaatgactaaaaatgcaataattgctagcaaggcattaaacatcatacctgtgaaaccacctaagttcaaatttaaattagctgctaacacagtataaaccgtaccagatactgctactccaaatgcatttcctaatgatgacgccattttatatacgcctgaagcaacacctgacttatcatctggcgcacttgcaactgctgtatcagttgatggtgtagcatataatcctaaaccagtaccaaataataaatatccaactatactagatacgatataccacatttctggtaaaaatgttaacgacaataagattaatccaatcactgtaaagccacttcctagtaatagtgggcgtttcggaccatgttgagataaaatcttttcacctacacgaatcattgacaacactgctattaaatacgttaatgaaatataacccgtttgcgaagaattaaatcctaattgttgttgataatacgtgttaatgacgataagtgcaccacctgctacaccatttaataagaagtttgaaatagttgcaccactgtaccctctatttttaaaaattgaaaaatcaacaagtggatgctttattttattttcgtaatatacaaaaccaactaatgaacagataaacactacaattaaacctagaattaacggtgaaactaaaccaaaatgagacgtctgtgtgatgattacatttaaacttaacattgtcactactaaaatgactaacccgataacgtcaaactttttagcttctgctttcatacctttgattggttctgctttagtctcaggtgcgtgtttgattaagtacattgctaataatgttaatagaattgaaacaacaaatattgaacgccaacctatatatgtagccattaagccaccaaacaacgtacaaataccactaccaccccaagaaccaatagaccaatagcttaaggcacgttgtcttcttgtaccaatataatattcgttaataatagcaagtgtggatggcataatacatgctgcagacaaaccttgaattattctacctataattaaaaatgctggcaaaggtgtaataatgatgagtaatgaacctacaacatttaatatcaatcctacataagtaattttgacgcgaccaaatttatcagcaacatcaccagcacctacgataaacaaaccagcaaataaggcagataagctaacagcgatatttatcgttccaacgtcactactatatgttgattgtaatgggacaacaagattaacaagtgactgcgcgaataaccaaaaggtaataacccctaaaacgatacctaaaagcaatcggttgtcacctctaaattgttttgatgtgtccatgaattagataagcctcctatgtttaagaaaaacaaatttttaatatgatatattaagaaacaatatcataaatttgcagaaaattataaataaaacatctcattttttagtatttttacaataattaacgatttttatccaaaaactttcatgataataattgctattttagtgtaaacgcatacaaacataacctataaaaaggctactcaaagattatttgagctccttgagtagcctcattttttataaatcatgaaacggaatcgctaaattataaacatcttctactattacatattaatactttgcggacgatgattagattgatttttacgatgtcgtgtcgttgggtctaatcgtttttctaaaaatcttaatagtacatcaatgacgattgcaatgatagcaatcggaatcgcacctgctaaaataaacgttgtgccatccgtcgcatttgtaccacgaatcacaatgtcaccaagcgtaggtgctcctataaatgatccaacggcaacaacacctatcgcaacaaccaaggcaatacgaatgccaccgataataaccgaaacagataacggtaattcaatcattcgtagcacttgattgcgtgtcattcccatacctttgccagcatccttaatattcgcatcaacactagctataccagtataagtgttttttataattggaagtaacgcatataaaaacactgttaaaactactgtttctgagcctaagcccatgactaacattaaaatagctaacattgcaatgactggaactgtttgaattatatttgcaattgtaattacaaatccagaaagttttgtgtatcttgcaagcaagattcccaatggaataccaattaaagctgcaaacagcacaccatagacagacattaataagtgtttgaaaaataaatcccatagatagccaaagttcgtaacataataattgaataattgctgtaataaattaccttccattacttatgaccacctttctgtttatcaaaatagtggtgttttttcaaaaattcttctgcgacgacagcaggttctttacctttaccatccgcttcataattcaagcgctgcatctctgaagttgaaatctttccagtcaacttattaatcgtcgttttaagttctgggtgttggcgtaataattcatttgttgcaacagcactcgcagcataaggtgggaaaaattgtttatcatctttaagtactttcaaatcatacgcggcaattcgaccatctgtagagtaacctaatgcaacgtctaacttctctgagtttaatgcgtcgtagactagacctatttgcattggtctcactgtaccaaagtcgaaaccatactcttttttaaacccttcatagccatcgcctttacgattcatccatgaactatccatacctaaacgtaaatctttactatgctttgctaaatctgaaactgtctctaaatgatattttttagcagtttccttcgttaccatgaatgcatacgtattcgcaaaaccatacgaatcaaaaaacgtttgatcaaatttctttttaaatccttgttgtgtggctatcattgctttcttaggatctttaattggtgcttccttcaaagctcccgttaaatctgtgccattatatctaacacctgatatattagcatccccattaattaaggcattatgttgaatcgtacttgaccctaaattatttactaatgttggctttatcttgccatgtgtatcatgctctattaacaaccgtaacatatgtgaaataatttgcgattcgcttgttgataatgctgtaattttgacatcatttttcgtgctcttactacctagtccgggcaaactacatccagataatacggtaagcgataagacaagcacgacaagtatatatttaattttcttcattatcttagcctcctaattatccagatacttttaagcctttgggaactacccatttttcaactaaagctaataaggcatcaacacctaatgctagtgcagtaacgagtaccgttgcagttacaatcatcagtggatcatataaatttaaaccattgaaaatgaaatcacctaatccacccgcacctacataacttgcaagtgtagcccaactaattacatacacagacgacaagcgaataccgcctagtataagcggtaaggctaatggcaattccacatccttcatcaattgaaattgcgtcattcccatactttttccagcttctttaatgttgctatcaatattttgaacaccgagtaccgtgttatttaaaataggtaataatacataaataaatagcgctacaattgcaggcgttttaccaacaccaaaaatcggtatcataatagcaagtacagctagtgttggaatagtttgtaagacacctgccacagttaatataatattggcagttcgctttgtttttgataataaaatgcctataggtactgcaacaatgatggcaagtaataatgccactatagaaatatagaaatgttccagtgttttcgacatcaactgtccaccatgttcatgtaggaactcgatcatgatttatcatctcctatgtcacgtactttgacattagtagtgtgttgctcatgcacttttgaggacgcagtgtcttcccccacatgttctgtttgcactgtatcctcactatcgccccaaatcgtgtcatatacaatatcaacaacattggcacgcgtaatcagtcctactaaacgttgcctatcatctacgacaggtacattcctaacgtttctttttaaaatcgtacgtacagaatcttgtaacttagaatcaatttgaacggtataaatatgttgttgcatggtatctcgtaaacttttgtgtccacgtataccctgatttatatcttcaatgtctaagaaacctagtaaatggttattactatctactacaaaaatagtatcaacacgtttttgtctcataatatgaacggcgtcattcagtgttgcttctgcttgtatcgtgattggtttaatcattacaccttctacagtcttgtcattgggacggtcttgaatcagtctattttgtcctataaaatcacgtacaaaatcatttgcgggatgtcttaaaatattgtctggtgtatcaaattgcaccaccttcccttctgacataatacaaattttgtctgctaatttaatcgcttcatccatatcatgtgttacaaagataaacgtcttgcctaattttcgttgtaacgttttaactaaatcttgtaacgtatctctcgtaataggatccaatgcaccaaaaggttcatccattaaaataatatcttgttcggccgcaagtgctcttacgacaccgatacgttgttgttgcccacctgatagttctgctggataacgctctaaaaatgactccggtaaatccacaagtttaattaattcctttgcacgtttatccttttcttctttagtccatttcaacaatttgggtaccaacacaatattctctttaatcgtcatatgaggcattaagccaatttgttgaataacatagccaatatttctacgtaattcgacaggattcatactcagaacgtctttaccatcaatttcaatttgtccttctgtcgcttcaatcatacggtttatcattcttaaagcagtcgttttgccacttccactggttccaataaatgcgataaattccccagattgaatatctaaagagatgtcatctactgcctttttattaccagaataaattttcgttaaatgcttaatacttaacataatcatttctccttcctcataaaaaatatgacgaatgatacgcataaaataaaaagaccatcatcgcaattgttaaacaaatagagtcataagttaaacaagtacacatcatggtcttgattatgtagaattttatatttttcatctgtaatgtgaatacttaacagtaaacggcgctatgtatgttaaatttctaccgattactttgtttgcacattcgtatattcgacatttaaaactaacatactctatatgatgttattaaacattattattttatcttttgcaactaaatagataactcatatttttcaaaagcgaatttattatcgctcaattggttgttttatagcaaaaaagtgtcagaaatgtgaaatattattgtaaaagtcgaatttttgtaataatgcacacgcatccattgttacaggcggacaaaagcccatccgccactcacaaagtcatccttatattttaatattttcatcattcattgtagacacccttaccttttgctaacagttcctactcccaagtctgtaacggaattccaccgtcaaagtgttgcccatgacaggcacacctaaaaaacaaccaacagcatgagccattggttgtttcgtgtcatcttgtatgttgttgtataaccggtatgcttttactcattaattacttatcatgcatccctttaccttctagtatttggttaatatacttttcaacacgcttttgtcttgtttcactgcgtttagcttgtccaatatgatatatatattgatgttgtctgcctggcgttgatttataaaatgacgactctagctgtggcatttcttcgaacttagcttctaactctttaggaataacatattcctctgttttcttcatttcaacttttttaccagctttttcagctttaattgcttcagcaatatagtatttaatttcttcgctacgtgcttgaatctctgttaaattttcaaatcgtaactgacgagctgcttgcaccttttcagtctgttgaatgagtgtatgatatttatcctccaaaatggcacctttatgaaataatagtgcaacataatttttgaagccatggataagtactacatttttattattcaacgtgtaacaaggatgcatccatttatacgcttcctctaattctgtttcattaaagattaacgctctcaaatatttatattcttcttgccattgactctctttatttaaaaatgcctcaacttgttcattcggttgtttctcactcatagtcatcacttccattttatttttcaatacacattgtattatatatcctaattttataaaaaactaattttacaaattcttttgcattcttacaaaaaatgcatttgactattattataataagcgtataattgtcgcatattattttttgtatttttggcaataacgaaggagtatttatgaataaagacaagcaattgcacaacgacaaaatcaatctatcccaattagtcttattagggttaggttctttaataggatctggttggctatttggtgcgtgggaagcatcatcaatagctggaccagcagcaatcatatcatgggttcttggattcctagtcattggaaccattgcctataactacattgaaatcggcacaatgtttcctcaatcaggtggtatgagtaactatgcccagtatacacatggctcattattaggctttattgctgcttgggcgaactgggtgtctttggtgacaataatacctatcgaagctgtgtcagctgttcaatatatgagttcttggccgtggcattgggcgaaaccaatgaaacatttaatggaaaatggctctattagcacatatggattgctagctgtatatctcatcattgttattttttcattattaaactattggtccgtaaaacttttaacatcatttacgagtttaatttctgtatttaaattaggcgtacccatgttaaccatcatcatgttgatgttatcaggattcgacacttcaaattacggccattcggcaagcacatttatgccttacggaagtgcaccgatttttgctgcaacaacagcatcagggattattttttcattcaattcattccagacaattattaatatgggttcagaaattaaaaatcccgaaaaaaatatcgcaagaggcatcgctatttcactgtcaatcagtgcagtgttgtacatcattttacaaagcacgtttatcacttctatgcctcaatcaatgttacaacatagtggatggaatggcatcaacttcaattcaccatttgctgatttagctatcttattaggaattaattggctcgcaattttactatatattgaagcttttgtatcaccattcggtactggcgtgtcatttgtcgccgttacaggtcgcgttttacgagcaatggagaaaaatggacatatccctaaatttcttgggaagatgaatgaaaaatatcatatcccacgtgtagcaatcatctttaatgccatcattagtatgattatggttacgttatttagagattggggtacgctagcagcagttatttctactgcaactttagtagcctatttaactggcccaacgacagtgattgcattaagaaaaatgggaccaacaatgactcgtccatttagagcaaaaattttaaaagtaatggcaccattatcatttgtattagcttcattagctatatattgggcaatgtggccaacaacggctgaagttattttgatcattatacttggattaccaatctacttcttctatgaatatcgtatgaattggcgtaatacaaagaaacaaattggtggtagcttatggattattgtatatttaatcgtgctatcaatactatcatttataggaagcaaagaatttaaaggcttaaatatgattcactatccatttgactttatcgttattattattgtggcgcttatcttctattacatcggtacaacgagttcatttgaaagcgtctatttccgtcgcgctacacgaatcaatacaaagatgcgcgagtcactaaataatgaatcaaagtcatctcattaaatattttaaaatgcagtgccatatatgatttcaacacacacattaaccaaccattgatttcaacatcttggttggttttttattttgaaaatgggttataaataactaacataacaagatggcgagagtgatattgtaatgaaatgtcactgtagaagaacatcatataatgctgaaattggtttgaattaaaacagatatcaagctcgtctgattcagtcacaaaattgtcttgttatacttgtcacctatcatctatagaccgtggtatgattaaattggggatgataaaggaggttaataaatatgaagattaatactacaggtggtcaaattcatggtattacacaagatggtttagatatcttcttaggcattccttatgcagaaccaccagttcatgacaatcgctttaaacattctacgttaaaaacacaatggtcagagccaattgatgcaactgaaatacaacccatcccaccgcaaccagacaacaaattagaagattttttctcctcacaatctgcaacttttactgaacatgaagactgtttatatctaaatatttggaaacaacataatgatcagacgaagaaacctgtcatcatttatttttatggtggtagttttgaaaatggtcatggcacagccgaactctatcaaccggcacatttagtacaaaataacgacattatcgttattacatgcaattatcgtttaggcgcattaggatatttagactggtcatattttaataaagattttcattccaataatggactttcagatcaaatcaatgtcataaaatgggtgcatcaatttattgaatccttcggtggcgaagctaataacattactttaatgggtcagtctgcaggcagtatgagcattttgactttacttaaaatacctgacattgagccatacttccataaagtcgttctgctaagtggcgcactacgattagacacccttgagagtgcacgcaataaagcacaacatttccaaaaaatgatgctcgattatttagatacagatgatgttacatcattatcgacagatgatattcttatgctgatggcgaagctaaaacaatctcgaggaccttctaaagggcttgatttaatatatgcgcctattaaaacagattatatacaaaataattatccaacaacgaaaccaatttttgcatgttatacaaaagatgaaggcgatatttatattactagtgaacagaaaaaattatcgccgcaacgctttatcgacattatggaattaaatgatatccccttaaaatatgaagatgttcagacggcgaagcaacaatctttagcgattacacattgttattttaaacagccgatgaagcaatttttacaacaactcaatatacaagattcaaacgcaaaactatggcttgctgaatttgcatggcatgatacttctagcgcacactatcgcagtgcttaccatattctagatatggtattttggttcggaaacttacaaatattagcagcacatcaatatccaacaactgctcaccttaaatttttaagtcgacaaatgcaaaatgatttagctaattttgctaaaagcggtaaaatgccttggccgatgtatcataatgaacgtcgctattatcgctcatatcaataacgttatcgcatctaaaaaagcacacctgaatttgatagcaggcgtgcttttcatatgagaattatgatgatttaaatgttttagcataatgattatttttcaatgtgaaaacaacgattaatcctaatgcgccaatgatggcactcgtatacgtgatagcttgaacagaaacatgtgtcatgaccaagcctccaataatgcctccaacaccaataccagcgtttaaactagacatgttccaactcattacttggcttgtgtcaccttcaacatgttgaatcacaccgctttgcactgctggattagtactccattgcatgatattccaaataaatagtcctgctaacaatagacctgaaccaggtaagattaaattcataagtaacatcatgacgataaaaatagaaacagaaatcattaaccaacgcttacttgtaattttatcggagaatataccacctaatgatgttccaataacgccagcgattccatttactagaagtgctaatgaaacgaatgacatatcatgaccattagataaaataagtggatttataaagacgaatgtcactgagtttgcaatcaatactaaaaacgtaataattaaatattttgctacttcagcaggtcttaatattttcgaagtaacatgattttcatgagaaggtgcctcatgattcacagggcctcgttgtatttcctgatccttcggtaaatagatcatcatcaagaagccaacaataatactcacaataattaagaatagaaatgtatagcgccaacctactaaatcgccgataaccgttccaattggtacaccaaaaacattggcaccactaaaccctgtatagacaagtccaatcattttgccacgatttttaggtgctgataacatcgctgtaatagctaatacttttacgataattagtgctgctgctgcagatgagataattctaccaactactaatattgaaaaatttggcgctacagcaataatgccattaccaatgataaatataagtaatgtccataataatacaggtcttgatgaaaaacggttcgttaatttaaccagaataggtccacatatcgcaaatgttaaagcgtacattgtcactaattgaccaacgacagcttctgatacatgtaagtcctgactcatcaagttcataattcctgcaaccatcatttcaaccattcctacgatgaaaatacttaaaatgaatgtaaatagtcgcatgattgacattttaaaactcctttcaaacaaaatttccgatattcatttcccttagaataacgatttattaaaaaatgtgtgcaacacaattttatatataaccgttctattatataatattttgctttaattttctgtgcttaattggaaaattattgaaattgtttttcagtatttgaaaaattaacacaagtatgtcatttaataattatgtataattacttcagtttcaacaatgactccaaaaaagcacgcacgctttatatgtcagaacagataactgactacaaagtatgcgtgcctttatgaatattttcgctatgctaaataatagcattactatatgtgtgcatcacttcatttccaattaaaactaatgcctaaatctgatgcggtaaaatctatcatgactcactcttaacatccgtatttcgtgctactaattgatgtcttgcattgaaaaattgaccatagcttaaatatgtcgcaatcaaagcagacataatggtcgcagttgtatgaataaacacgactaacaattgaaatttaatcgcttgtaaaggtggtacgccaccaataattaagcctgtcatcataccaggaatcgacacaagcccatatgttttaaccgaatcaattgttggcactatagctaaacgaatactttcacgtattgcacctttagaagccaatttaggtgtagctgcaagtgataatttagattcaatattagtaccatcttgtacgaatgcacgatctaaattctggtaagctaaattaattgcaatcaagccattatttgcaagcatgccgccgataggtataacttcattggctgtaaattggatggcccctgtcgcaatagtacctgcaagcggtaatgccgttccaacaaagatagccacaaatgaaatcaaaaagacatggtgcatgacaggtgatgatcgactaatcgtattccatgatgcgttgacaataatgacaaatacacataatactaatagccatttgtcattaattttaaaaatatagtgcagtaagaatcctaaaatgattaattgtacgaccgcacgtagtgtcgccacaatcaaatctttaataatatgtagatcttctttataagaaataatgattggaataactaatagcaatgccgtcagtcctaatgccgtattactcatgttggttcaactcctctgtattagaaatttgaccatcaacaatggttatacgcttttgaaagtgtcgcatactttggtcatcgctgtgggtaatccacataatggccacgccttgatttgctaatttaaaaatgatattttctattttttctttattattaatatctaacgcacttgttgattcatctaatagaaggatgtctggggtatacattaattggcgtgcaatcgcgatcctttgacgctcgccacctgacatatgttctattttagaacttaattgatagtgtcctaaacctacatctttaatcaattgcttggcacgcttcttatcaaatttatcattacgtgcaagagacggaaaaatcatattatcttcaatcgtttcaccaaacaaatcgctttgttgcatcaaatagctaatgtgacggcgtaatatttctggttcgtaatcatcatatggtttacctttaaagtaaagcgttccactggttgggctaattaaattacatattaatttttgaaatgtacttttaccactacctgaaggaccaataatcgcaatggtttcacctttatctacttttaaattaatatggcttagtatgactctatcacttgtctcatacactaaatcttttatctctaacaacatatttccccctcctcgtatcatgagttatttcgatataatagggtattccttttcttgaatagtgtgctttacctataagtcaacctagtcaatgcttattaccccttaaaatcgctctaataagacatatcaaatatagtattcccatttttgaaaattttactgccatttcattccggaaaattttttaatatttatgtcaaaattgaagtaccctgcagtgacttaatctcatctttttaaaaaaaaagcctttaacatgacatctcatgctaactaagcatctaacttagttcttgcatgacatcatattaaagactttctttattatttatggatttgactaccacatgatatttttataagtttcatcattcaatgaacggacaatttcagtaacaagacggatagaattttcataatcatccacattgagtaccgatacattagagtgcatgtatcgtaacgtgacaccaattgtcatcgttggaataccttcatttgcgacatgaatacttcccgcatctgtccctccacctggtgtagtatcccattgtacttcgatgttatgtctgttagctacatctttaatatgcttgcgcaaaccttggtgcgcaatacttgtagcatccatcataataacaactggaccaccgcctagtttactatcactcgtttgacctgacatacctggtgtatcataagcaatacctacatcgacggctatcgccaaatctggtttaattgtattcgctgccactttcgcaccacgcaaaccaacttcttcttgcactgtggcaccactgtataagttaatgccaatattttcatcttttaaacgttttaatacctcaacagctaatgcacagccatagcgattatcaaatgctttcgcagttaaatatttatcatttgcaagcacttcaaattcactatatggcgtaaccatattgcctacttcaacgccagcttcttcagcttcttccttgctactaacaccaatatctataaacatatttttgatttccattggttttttacgttcttcaggcgttaagacatgcggcggtttagaaccgatgatacctctaatttctttgcccgaatctgttgtaatcgttactttttgagatagcatgacttgattccaccatccaccaactggcgtaaatgaaataaaaccatgtttatcaatctttgttaccataaaaccaacttcatccatatgaccagaaatcataattgagtattgaccattctcagcatttttctttccaaaaatgccacccaagttatcttcaataatttgatcactgacaggctctatatagttacgcattgcttctttaacttgcatttcataaccagcaatgccgtttacatctgttaaatgtttaagtaatttgactgactgattcatgttattcatcctcctgtattccaacttaaaactattgtatcactaactttcagaaaaacgttccctaccgctttatcgttttcaggcttaataattttaaaaactttgtgaggaatacacttaaaaaacctcatatttctaaaatttaatattccgaaaaactcacaatttaaaatttcttattataatacgttattcttttattgttattaacttcaatctgtttagtcttgcgctattaaaaaaataaaaagtgtagagataacaacgcattaacgccgcaatttcccctacacttaaatactagtttctttatttaacttatcattaaacttattcagatgttgaatatccattaatcataatgtgaccatgccgatagtattaatacttctttatttcgatcatctacggtatagacgaccctgtgctgatggttaattcttcttgaatatcgctctaaatatttaggttctaatttttcaaaggattgtgttattttacaaggatcattttttaaagtctcaacaatttctataaatgtcttctttaaataaggatgttttattttctttaaatctaacttcgccgaatttttaatcttaaccgtgtaattgctcattaaagattatcccaatcaatatcgtctatatttgtagtaccactattatctttttctctttctctgactttgtccattgtaccagtagattcaagatatattgtctcttgtatacttttccaatcttctaaacctataatcacagcattattttcggcattattgccactaatataaattggttcgtgattattattaacattttttagtaattgataaaaatgctttctcgcttctgtagggctagtgataatcatataaatcctcctttatcttctgttacgctaattatggcgtacgcacttaagtacgtcaatatcaccgacacatccgtcgtaatcttagtccctatatactatcgtacacaagcttttgttcttttcttccaacataccgtctataatgctcaaaaagaaatcagcagtggaacacactacgttccctaccgctttatcgttttcatgcttaaatatttttaaaattttgtgagaaatacacttaaaaaacctcatatcttcaaaaaaattgacaaaatttaaatttttgaataacatcattttttagtaaatgttataatttctttataatacaaatatcgaaagaaggcgactgactttgaaaaaattatgttcattaattgtagtagcattagtttgtatcattgcattatcagcttgtggtaaagaacaaaccaaaacatatgaaggtgatgttagtggtaaacatgtactaacttctatcacatataaagatgataaagttttaaaacagtctacaatcaacacaattaaatatgacgatctaggtatggataaagacgaagccaaaaagttattcgccaaatctgaaagtattttcaaagaccttaaaggcgtaaaatacaatgtagactataaagataaaaaagcaattgaacacttagacatagattacacagaagttgacatgaaaaaattaaataaacgtcttggtgtttcaactaaagaaaataaagatattagttttgaaaaacttgaaaagcaattaaagcacagaggcttaaaagaaaaagataaaatggacgacaaatagtttataacataaaaatgccctcagataagactaaggttacaaaccttaattcatattttgagggctttaatatttgaaattcttgtgtgaccagcatccactatccactactaatataaaattatttgcagtaacgctaaaatccgctgctttcattttcccgaaataaataagttaactaatgagttttaatttataatcatgtatcgtttgcaattcaccatcgacttttcgatatacaatatgatcagcagtaatttctgtagggcttgatacgccaacagctgctgcaatattgaataagccttcatgcaaacttgttacatagtttgtgacacgatattgcttttctccaacaatcaatgctttttcttttttcgcatctgtcgttgcaacacctacaggacatgtattcatatgacattgttgactcataatacaaccgacactaatcatcatcccacgtgcaatattaacaaaatctgcacctaaacctagtgcaatcgcaattttatctggtgtcactaacttaccagatgccgccaatttcactttatctcgaataccatatttttctaacatgccagacacaataggtagagctgtaaatagcggtaagccaacaccatcttgtaattcttggaatgttgcaccagtaccaccttcaccaccatcaatcgtaataaagcttggatacttatctagttccaccatcgtacgtacaagtgtttcaatttctgaaactttgcttactacaattttgaatcctactggtttttgacctaattgctgcaactgatcgacgaaacgaatcaaatcttcagcattatgaataaattcgtaacggttaggtgaattgattgttttataaggttcaacatttcggattttagcaatttcttcgtttaccttttcagcttccatatgaccaccacgagtcttagcaccttgtgccaacttcagctcaaatgcacgtacgttagataactgtgcgacctctttaaataaaccttcactaaaattaccttctttatcacgaacaccaaataaaccgggaccaatttggaaaatgatatccccattaccttttaaatgatattctgataagccaccttcacctgtattcatccaagtgcccgctttagctagacctttagataaagctgtaatggcattttttcctaaggctccataactcataccagattgtcctacgatacgttttaaaataaacggatgttttaaatgttcacctaattttattgcatgatcatcacttaagtaatacggatcaatctttgtcggtacacgatattcttcacgactaaataaacgctcattcgcgattttataaatgaatgttgataacaatgttgtattatctactgaaatctcattacgttgcatcggaaacattgtgttctgtatgtaaaagccgtcttgataatctttagtagtaccgaaactggtcatacgagagttatattttccagccaaaacgatatttttataatcattacgtgaaaaaggtttcccttcattatccccagaaaataaatactgacgtaattccggccccattttttctgaaatatatctaatacgtgctagtaaaggataattccttaatacactatgttgtgattgtcttttatctttaattaaccaaataagcccgataaccatgaccgtaagtaggaagcctataatgataatattaactataaattgcatgactgtaagaaacgtcattacaatccctccccccaaaatttcaattcaatatttatgatacaccttacaaaataaaacacaatggaagcgcttcattttataaaacaattttatgatatgtttttcattttaaattttaatgtataaaacatacaatacaaagtaatatgtgctaaagtatctatataatacaactatttaagaggtatactatgtcaaatacaaataaacattacatagaagaagaatacgctaccgaacaatcgcgttttttcaaacgtgatattggatttattttcctttatatatttttgattaacatcttgccaatcattatcgtctttttaacttttgggttagtagctgtattcactcaacaagccccatggggtttctcttttcctatttcaatgaacattagctatttactcgcagttattatttcactagctatttatcgtcggatgcatgaagatgcatttgttccaatgatacgttcgcaaatcgttgccagtgctaaatataaatggcatattcttatatcatttacattaagtatcgtactctttttacttttaaatcatttcgatattttcgcactaaatgtagattcctttactgtctttgacatttacccgctcattagagaatatggttccatcagtttaatagctatattttcgttaaccattatattaaatactttgatttgtcaacttattttccgtcatattttaattcaagaattaagaagattaatacctttaaagattacaatagtattatccgttatccttgaaacactgtactattatccatacattaatacatggtgggaattcattccagcattgatactagcaagtagtgcgacttacttatatttaaaatcaaaccgtaattttatggtgagctatttctatcaattagcagttatactcgttttgcatattttcatgtaaaatttttcagagtattatccattatccatacacatcaaaaagcacacttaaaagtcagtatcacaactcacttttaagcgtgctttatttagatatactgtcgttctaaaaacgagccatatagaatgtttcatgtcctagcatgaagcacatgaatcgccatgctcaatataccttttaaaatttaaatattcattaacttaatatgctttaattcacttcattaaagactatttgctgggcgtggtgttggttttttcaataaactcataatcattattacaatgactaacataccacaaattagatacatccatttaaatcctactaaatcggaaataggtcccatcaatgcgccacctaacgatatacctaagtctgcacaggcaataaataaacctaacaacatattacgacctacttttggtaagacgaaacttaagtatgatgttaatgttggatacaccattgcttgtgtcattcctattaatattgcactgccatagaaaataattgcacctacttgcggaccaaatgccactacaaatgacgcgatcactaataatgatagtacagataccatatatttaggatgccacataccatctgacggaatgtatttccttaagtaaaatcttgccgcaacaactgcgatggcctgtattgtcaaaaagattcccgcattcgcgaatcctaaactcactgtgtataacggtacaaatgtactaactgcaccaaatacaattgatgcaacaatcatgataataccactgttcaacaactctttatttttgaaaaattgcgcaaaaacagttacagcgttaaacggcattttttcaatcttatctgacgtatcgggttcctgttcagcaaaggtcacgcgatagccaaagaatgttgttgttaatgcgataaagataatgacaattgcaaatagtgaaatattatttgcattccaaatacctacggcaactaatggtccgattaagtttggaatcgttgaaaatagcgagtacaatgatacaccttcagaacgatgttcctctggtaatgcatcaataatacctagctgtaaagacatagaaaagaatgccgtacacacaccttgcataacacgtgctacgaaataaccttctaagccagtaaaaccataaataattaaagctatggcattgataatcaaaataattcttaatactttaatgggaccgacacgagcaataatttgtcctgcccatggtcgaaataccattgctgttaacatgtatgcccccataacgataccgataaccgtattcgttgcgcctaaatcatgccctcgtaaaggtataaacacgtttaagattgcattggcactaaagaacatcaatgttaatatatataatctcaaaaagggccaagccattgcacctttcattatctcactccttagaatgatagttgtttttctattaattctcttgtataagcattgtcacttttatgcaatgcgcttgtcggaatttgttcttctatttttccgtttttaaaaataattaattgatcacataaatacgtggcagcttgaatatcatgtgtgataaaaatataactcaactgacgcgtttcacgtaaatgaatcaataaatctaatatttgtgtttgaattgacatgtcgagtgaactaatggcttcatcaaacaaaatatatttagggttaatacatattgcacgcgcaatcgcaacacgctgcgcctctccacctgataacatattaggatatttatccatgtatgccttagatagaccgacttcttccaacaatgtaattgcttgtacttccataacatctttaggttgtccatcacattgacacatcacttcaaataagatttctctaacagtctgaaatgggtgtaatgatgacgtataatcttgaaatacagcaccaatttgatgacgtctcactttcttcttatgcatcggttgatcatttaaggttacacagcctttatccggtttctcaatacctaatatcatacgactcaacgtcgatttaccgctaccactttctccgataatcgcaatcgtcgcaccgattggacactcaaatgacacacctttcacgataggtgttcgacgacgcttaaaaacatgtgcgctttgatatgacttttcaacatctttaattttaatcatgtacatcacccctcatcacatgtttaaaatgatcattaatcttcttctttgttgataataaatacttcgtataaacatgttctggatgatgtaagactgattcacgcgtaccatgttcaatcagttgaccatttttcatcacaacaacacggtctgcaatcttgttaataaccgttaaatcatgtgaaatgaaaatcatcgcacagtcaaagtgttttttaatatctataaatgcttccagtacatcatattgtgtaattgtatctaaagccgttgtcggctcatcagcaatgattaactttggtttcaaagctaacgctaaagcaatcatcaatcgctgtaacattcctcctgataacatgtaaggatatgattttaatatacgtttaggatctttcaaacttaaataatccatatattcaatcaatgtcttttcaatttcttgtgtagacattgacgtatgtactttcatagtctcaaacatttgtttaccgacagtagttgatgggtcaaaggcacgactaccttgttgcatgaccatcgcaatatctttaccacggtattttttcaattgtgtttccgataacgacaacattggcttaccatcaaaggttatatcacctgttacgcgtaatcgttctggatttaaacctacaatcgatttgcatgtaattgatttaccgctaccactttctccaataacgcctaaagtttcacccttagttaatgtaaaattcacatcactcacgagtggttgatctgtccaggtatctgtaatcgtcaaatgcttaactgttaacaatgtcatgattgcaccactccttttttcacagaacgaagtttgtctttagaagagatgcgaggatcaatagcaatttgtaaagcatcggataagaagttaaatgccatcactataatcactatggcaatacctggcgcaaacatcatttcaggatgtgtaaacatcacttttctagcttcgttaagcatcatgccccactctgcagtaggcgctttgacacctaatcctaaaaatgaaaagccagatatttgcaaaatcattgaacacatcgaactactagagatgatagcaatatctgctaatgttaacggcataatatgtttgtgaataattttcatatcattcataccgattgttttagcaaatcttacatggtcagaagcagtgtactgcataacacttgtacgtataacacgacagaaccatgcccaacgcgtcaaaataaatgccatgataatattttcggcacccataccaaacaatgcaattaatgctaacgttacaacataacttgggaatgccaacataacatcacacgcacgcatgattatggcgtcaacaaacccttggaaataacctgataagaatcctaaaatagatccaataagtacagaaacaaatagcgcaacaaagacatataacaaacttggtctaatcgcataaattaacctagttaaaatatctctacctaaatggtccgtacctagtagatgttgaaaactcatgccagcaaatttgtttgctgtatcgatatggttaggatcataaaatgtcacaagtggtgctgctaatcctaaaaagacatataatacaataatgcctaaagcaatcactgcacctttatcttgtaataatcgttttaaaattatcatcgtgcgccctcccttaatcttggatttaatagcgcattaatgatatctgctaatgtattaaatacaataaataataccgctacgattaatacatatgcttgaatgactggaaaatcatgttcaagtattgcttttaaacttaattgacctagtccaggccatgcaaagatatactcgataacaactagtccacccattatcattggtatagacatacaaaagattgataccgcaacttgtaaagcattacgcaacacatgcaacattaatgtgatagatttcacaccgcttgctcttaaataaagtacataatcttcatttaattgttccaccatcgagcgtctaacatttctaaagtaaataccagcataggcaatcgtaataacgatcactggcaatatgtaactttctggacctgttaatccagaagtcggcaatatgtttaacttcactgaaacgtaaataataagtattgaagctatccaatatgatggtaatgcagttagaaagaaagccactgaacgtatcgcacgatcagtgaactttcctctttttaatgcactaactacacctaaaataattgatgtaatcatcaccataacacttgaaattattgttaatttcaatgtattcataaatgctggaccaatgcgttcagcaacaggatcacctgtaatgtagcttgtaccaaaattaaattgcatcgcttcaagtaaccaatttttatattgaattaataatggatcattgaaaccgtacttctcattcgtttctgcaatcaactctggtgttacatttggcgttccttgtgcatgtaaaattgtcacagctggattttcatttgtaatatacgtcaatagaaatgtcataaaacttactacaatcatcaatggaaacatgagcgcaatacgttttaagataaatttgaacatctaaacgctcctttatttatactgcatttcattgaatggtaattcgtactgtgattgtgtgaatgatactttttctaaatctttcggcgcaacaactgtcatactaccgtgtgaaatagggataaagataccttcatcatcaacttgtttcaaaatgtttttataagcgtctgaacgctctttaccgttttggattttaaatgcgtcatcaatactgttgtatattttatctttgttctcaatgcctgatgttgcactttcataaccatttttcgctttaaatgctgcaatagtactttgtggatcgtacaataatccccaagtttggttgaacattaagtcataatcaccagaagtacgacgttcagcaattttatctgatgtttcgccattgatgtttaacttaatacccattttcttaaattctgcttgtaagtattctgcttgttctttttgacttgaagaacctttgtcatagtacattgccatttcaaggtttttaccatctttttgacgaacatcgctgtctgtacctttcttccaaccagcttcatctaataatgattctgcttttttaaggtcatacttacgtgtcggcatatcgaaattaatgtctgttacatttttcgcaaataattgagttgctggcttttcttgaccatctaaaatttctttggcaattttatctctgtttaccatatgaccaatcgcttgtctgactgttttgtcactgacagcgttatcttttttaccagaattgacaactaacattttcgtattcataggttgactacgcttaacttgatagtcacctgtatctttcaattgttttaaagagtctttgtctaagctatctgtacctctatcatctgtgaaggcaaagttcgtttcaccttttttcattgataggaatgctgtttcaccagcaggcattacttttgcttgtactttgttaagtttagacttttcgccccagtattgatcatttttgttaaagtctgcagactcatcttttttgtgttcacctaatttaaatggaccagtaccatcgaactttttaacgccatcttttgttgtgccgtttttaaagtcttttggagacacaaatacatatggacgaggcatcgctaattcagccaatgcaggttgatatgcttctttcaaattcaattcaaccgtgtacttatctttaactttaacattgtcaattaatgttgaaatctttaaccaagaatgcaattttttgttttcttgaactgcgtcaatatttttcttaactgcgtcagcatcaaatggcgtaccatcatggaatttaacgtcatctctcaaatggaacgtgtatgtcttcccatcttcagacacttcccattttttagctagtaaaggcttaattccatctttcgtgttacgtacaagcggctcgtatatcatactttcagcagacatcgatccaccgtaaacatgcgggttcatatccccgatatctttaaccgtcgtatacgttaattgcttgttttcttttttctcctctaaacctttattaccgctacaaccagttaaaattagccctgatgcaagtaacattgcactcattttagttagttttctcatttgcttttcctctttctaaattgataagttgcattacttaatcaaatcgtaatgattatttttctcaattatttgcttatttttatgtaaatgtcaaacataattcaataattttttctattataaaacttcaaacccttattatgaaagcgttctattaatttccaaaaattttgtgacgagtgccttatcttcttcaaataaatttgtattaaattgagaagatagttgttgatcttcatgtgtctccttgtacgcctgacaacttgcttcgtagcgagttaggaactgatcaatcattggcgtttggatacctagcattttcccaatatgctgaatcatcgccgttctgtaataatcctcacttggcattcttggaatttgaacaacatcctgttcatttttatagacttgcttaaatggtacagctgaaaaatcaaagtaatgtccgttttcgtctggctgtgaaaatggatcaatgaggattgcggtatatcttacataaagcagatattcttgtaagatatctggcaagatttcgaaatgctcaatatcaccttcatccaaagtttcaggacgtactggataattttccttcaccataaattgaagcaggttgactgacggcactctaaatgcttgtaaaatagccatcatttccttccacattaaacgcatttcacggattagtgtcatcgttatcggtccttcaggaaataacttatacacataaaccggtacatccgttccttcgaaaatggctttcaatgaaaagtcattcataaatagtggtgggtgcacataaagcgaactattacgtgtttcagcatgcagtggcgattcaacgacttctaattggatcttcaattgctcagctaaagcagagattcgttggcacatttttgagtttgaatgtgtcgatcccatgtacaatttcttttttacacctgttgtcaacacatgattaggcgcttctttatcaacaatacgtgtatcgccaagataagttgaaaatgaaatcacttcgatatcctgactgaacttagacataaattgttccacaatcatttgcgatccaaatgtcggtgaaattaaaatgacatgtttgacactttgcaaagtttctaacgacaattgctgtagtgtgtcataataagcatctgctgtacatgccatgacaaccgtttcgtattcacccttaacgtttttaacatctttatacaaacgattaatttcaaacttacctttcagatgttgatgcgcctcgttttgtattttgacttcaaattgtttctcttttttatacgcttgatataagcgttttgatttttctgatgttgaggcacgtccaaccatatcaatctcataatctgattttaaatagcaaatattcgctaattggattgcgaccggaccagtgcctatcattaataatttagacatccgtaatacctacctttatagctgcttttttataaagtgctatatcaaaaatttgctgtggtctcatatgtttattcacacattgccacttatcttccgctgtttcttgtgacggataattaaatattgctttgatgccatcaccaaagcgcattgcaactacgacattttcatttgttaaatcatataattcttctaaaatgctgtactttaaaggaattgtcgagctgaatatgatatgcgtcacatctttgatatctttaagttcagataccttttgatccgtaattgttatatcttcatttggtgctaagacgttaacgattctgcgtcctaggtcaacggcttgtggatcaatatcaataccgataactgaagcacctgtttcttttgctacttgaattaacgtcattggatatgcacctgaaccaactaacaataatttgtcattgctagctatactacattgtccaaactcttcatcaatacaatgttctatattgtcaaaataacctgtggtagacgcctgtccgtctaatagacgtctagctctaatgacttccacttgtttaacacactgcgctgtaatatattgcagtgattttattaattgtgctttttcttcaacgtcacgccaagcattaaattgttgttcataaataggatttaaaataaattcactatagtcatccatcaatgtttctaatgcttcgatatattgatcgtcttgtaatacacactcgtaatgcgcttcaaacttttctaaatattgttgtaatatcaatttgatttcattattaaagttattcattgtaggctccttattctatatatgcttttcctgtagctacagttgtaacctgtcctttaattgaagtttgatatcccaattgatgacatcgctttgatgtcactaaaatactgccccctggctgatgtactgtaaaatctttgcatgcgtcattacgttgataattattaaaaaccccaattgatgctgtaccagaaccacagctattttcccaaattaaactttggatttctggtatatagattaatggctgtaaaaattgacgttgttcatcaaaaagcatcatacctactgttttatatttgtgattccattgttgctcacgcacatatgtttcaaccaaatgttgaatttctgttgttacttgattaactggaatcacataatgtacatatgtttcataaataatttctattgctttccatgaatgattacccatattaattgttgttggcacaacacgatgggcttgtggcatttgaacttcatagtattggcaatcatgaattgcgcattgcactaaatccgaacagccagataccttcaccttaaactgttggtctttaagcaaatgactttcctgcaaatgatgtatatatgacatcgtcgcattaccgcaaaattcattaccgctcataactaagtgaaaatcattgccatcatcattttgtgttgattctataaagcctacctgttcacagcatacatgtgttgcggccatcaactgattggcgatagatgcatattcactagcatcatgttttgaatgaacaagtatcgtcatattccccgaaggattatacttagaaaattctataacctgccgattcatacgacactcctttagatgtatttttagagcctctgtaattttaattactagaggctcttatgcagttgttgcgaagcaaacaactgtattcctctaaacctgtaattttttagaagttgaacctaatagctctatctattaggtaagtcatgctaattcgcaaaagcgaaaagcatggctcttatgcagttgttgcgaagcaaacaactgtattcctctatacctgtaattttttagaagatgaacctaatagttttccatctattaggtaagtcatgctaatccgcaaagtggaaagcatgacttagtaatcggttgttgcatcaacatgcaaccgtaaaccttatttaaagttgcttcttgtggctctacaagcgaatgcagttgtccgttaactacattcacttagatgcttttactgttttcacctcaactaaaacttcaaaaaagttgcagaaaacaaatcgtaactattacgatttgattatatactatattagttgagaatcattgtcaataaaggttgtaaatgaatgctcatttatattttctgaatccctccataaacatcgcattctcagcacattcaagtctttttgaaaatttttatcaaacaaaaaagccagcttcaacgtaaaatacgttaaaactagctttaagcaatacacttcatcaaataaacaaacatttatttttcaaaggttaataattccccgtcatttggtacaacaactctattacctaagtcgttagaatttataaattcattcagctcttcacgagataaatgccaatgattgaccgcttccatatgtacaacaactatttgagcaagcggcaatgtatgagcgactttcaatacatcatgttcatccatcactaacggcccgccttcaaagaattgatttgcaccaccattaagtactacgacatctggatgatgcgcttttaaagtcttctcaacaccgtcgaaccaaaccgtatcagcagctaaatataacgttggctcttcagaatgtttcagcactaaaccgtgaacatgtcctgtcattttcaagatttcaccatgaccatgttgagcatctgttttaatcaactcaatttctccaatgtgtgtcacatcattaaataccgaaacgtttgtaaagtcataaccctccacttcactagcgtctgcttcgttttgtgtataaattttaatatcttttggcaatacttcaatcgctttcggatcaaaatgatcaatatgcaaatgtgttaaaattactaaatcgatgttgttaatgatatcttcaattgctaatggtagttctacaagtggattgttttcatcttgtctcggtgaatttggaaatggttcaaatgcgcctttgtcacttaacattggatcaatcaaaatgcgtttacctccatactcaatcacggccgtggcatttcttatatgtctaatattcatgttaaatccccctattttatatgtctgtcattgcgacaatatgcatacattgcctacttcatgccaaattattttccactggatatcgattttaaaacaattattctaatgtccgcttccacgaatcatcactcaacatctcgccaggccatgtgtaagccataacaccgccgtcaatacgaattgtttcaccagtaataaatgaactctcatcagatgctaaaaagacaacgagtttgcccacttcttctggtttacctaaacgtcccagcggtgtcatccatttctgattttctctgaatgctttgccttccttatcttcgctagtacctgtcagtttatctactaacggggtttcaatcgtacctggtgcaattgcattagctcgaatgccatctctaccatattcgattgcaatggatttcgtaaaattaatcactgcccctttcgcagcattatatcctgagcgatacaaatctgctgcctgtcctgaaaatgaagatgtgttaacaatagagccacctttagtcatcattaaaggtaacatcattttcgtcatcaaaaatgttccacgcatatctacattcataatcttgtcatatacatctgttggatactcatgaattctaccagccgcattatccacaccggcattattaaataacacatcaacatgcccaaactgttctctaatttctgatgcaaaattgtcaatttgttgttcgcttgcaatatccacaacataagcctttgctttgtcaccattacttttaattttatcgacagtctccgataccgcttcagctatgtctaccgccaatacatacgcaccttcttgagctaaagcgattgcagaagcttgtccgatacctgtacttgctcctgttacgactgcaactttattttctaaacgtttcattcagtcactcctatacaacatatcttaaacttacagtcattattttccactgttcaatgcttcataaacctaatagataagtctctaggcagtcttagctactctctgctatacaatttctattgaataactcaaaatatttaacaatattagatttttcattttctgaaaattgttacttttgagagtattttttgttacactttaaatatttaacaaaggggggaatcattgatgacatcaaaacatcaacaaaaggggtctatcgtcaatcgtttcttgaatagtgttgaaaaaattggaaataaattgccagatcctagcgtcttattctttttaatgtgtgtgggcttagccattatgacatgggttatctcattatttaatgtatctgttaagcatccaggtacgcatcaaaccatttatattaaaaatataattagccatgatggatttacgatgataatgaatgatacgattaaaaatttctcagagttcccagcattaggcttagtactagcagtgatgattggtattggtgttgcagagaaaacaggatacttcgacaagttaatgatttctgttgtgaatcgcgcaccacgtttcttaattttaccgactattatattaattggtattttaggtagtacagctggcgatgctgctacaattatcttgccgccgctcgcagcgatgctttttattaaaattggctatcaccctatcgctggactaacgatggcatatgcttccgctgtaggtggctttgccgcaaatatagttgttggtatgcaagatgctttggtctattcatttacagaaccagcaacacgtatcgtttcagaatctattaaaacaaacgttgctatgaactggtactttatcgcagcgagtgtcgttgtattacttcctacgatattgctagttacaactaaactgattattcctaggttaggtcaatatgatgatcgtttaatgcatgatgatcatgaagaaacgtcttcacatattactgacaaagaagcacatgctttaaaatgggcaaatatcagtttcatagtcacaattattttattaattattacagccattcctgaacatagctttttaagaaatgctaaaacaggcagcttactagacgatgcgccattaattaacggcgtcggattaattattcttgtcgtatttttagtacctggattagtttatgggattttaagcaaagaaattaaaaatacaaaagacttaggtaaaatgttcggcgatgctgtaggatcaatgggaacatttatcgttattgtgttttttgcagcacagctacttgcgtatttaaagtggagtaatttaggaattatcgctgctgttaaaggtgccaaattattagaacatcaaaacggtattgtattgatactaggtattattgtactgagtgcaatggtcaacatgttaatcggaagcgcatcggctaaatggggtattttaggaccgatattcgtaccaatgttaatccttatcggctttcatcccgcattcacacaagtcatttaccgtgtaggagattcaattaccaatccaattacaccgatgatgccgtacttacctttattattaacttatgcacaaaaatatgataaacgcatgaaactcggagccttactttctagtttaatgccgtattcaattgcgctaagtattgtgtggacagtatttgtcattatttggttcttattaggtatccctgttggaccaggtggaccgatattcgttaaataacagcactcaaggggattaattaaaatgccactatacaagatttgacctgtatagtggcatgatttgttatgatatagcgttcgagatgaaactctgtatttatatgaataattatagtttatcactaataatatttagtctgttccaaccgttaatttggtttacaacaaagacaagatcaataatttgttcttcatcataaaatgattttagccggtcaataatttcaaactttttaaagtctttgattgaatttaacatttctgcaaattcaagcgtcactttttcttgatctgtaaataaatctaaatgtctaaaactcaagacttcatcaattttcatttgtgttacacccaattcctttaattcttttttatggatatcaacacaataatgacaaccgttaatttttgaaattaataacttaatcaatgcactaagttcatcattaacgggtgattgatgaataaacttttcaccttggctcattacagacattaactctccattttgtttcttgtaattatacggcatttgcaatctctcctttacattgtttaataccaatccagtgatactacacttcgaacaatattggatagaatttgaaattctgtataacatcttgtcaatctgtgctttagttaaaacatttagcgtttacatttaaaaaatatataaaatatgaaaacagattgaaaggatattataccttgctctacccttttttataaaaaatcacacacatttgagaaaatttgataatgtcaataaatcacgtcatcgccattgttattcggtatataatgtttttataatggccaaactattatttcatttacattaatgggggttacttgtgttaatgtactgtaaaaaactggcgaagtattggtgatgatgaggtgatttatattaattgcgaaacaccttcgatagcaatgaaatagattattggaagattaaatcaaaaataaagaagaccctagtggccttcttttttatctaattcttctttgattttttctggtgattttgtttttattttaattatttccgataaatttttgcttagtattatatcacctacaaattgaaagttattttcaggcgatgcataagcaacaaaatcatcttctttgttttcgtttatgtatccttcaatcacagcacttcccataggacttgtttccaagttagtgaaatgtacagatttgatcgtgttcggttctttagtattatgcttgagataaagtgtaatacgcgcttgttgttctttataataaatagctttttgtttttctttttcatcatatttcattttaaaatgtatgaccgtagcgactatacatatacataaaataacaccaataattataaaaacatgttttttggtcatttaaccatctccaaattttagtgactctttttatttagttctttttttatatcatcaggtgattttaattcctgtgctggttttagtaattcacttaatctttcacttttaattaaatcaccactaaattgaaagtcattttccggggtagaataggcaacaaaatcatcttctttattttcattgatgtatccttcaatcacagcacttcccataggacttgtttccaagtttgtgaaatgcacagatttaatcgtgttcggctctttagtgttatgcttgagataaagtgtaatacgctcttgttgttctttataataaattgctttttgcttttctttttcgtcatatttcattttaaaatggatacctgcaataagcatacatacgcataaaacaacaccaataattataaaaccatgttttttggacattaaagtaactcctaactttagtgactcttctttttatttagttctttttttatatcatctggtgattttctttcatgtgcaatttttaataatttatctactccttcactctttatcatagcgccaccaaattgataattatgttctggtgtagcataagcagtaaaattatcttttttattttcattgatataaccttcaatcacagcacttcccataggacttgtttccaactttgtgaagtgtacagatttgatcgtatgcggttctttagtgttatgcttgagataaagtgtaatacgctcttgttgttctttataataaattgttttttgtttttctttttcatcatatttcattttaaaatggatacctgcaacactgattaatatgattaacataatactagttaatattaaaattttctttttcgacatgtatcaccagctcctaaaatgtggtggaattttatacagtttacatgattatgatactacataacacgctcttaaaaagtaaaagtagctatttagtaatgaggaaatactatatttaaaattgtatgtttatatcaagctaagtttaacggattaaagagagcaggtctatcacctgttactaaaacttatagactcaaaaccaattaattgtatttaatatttgcagagacaaattcgaatcacttgttagacttcgagttttattctgtcgaagattcaaatacaatatttgataaacattaagcaattaaaagtgttgatataaagttcatctaagatcatcggaatattgcggttatgaagtggttaacagataaatacagtggaaattgtactaaaaattcaacttttcatttttatgtgtatgtatgattaacttgaaagcataattaaaacgaccgcatagttttagcggtcgttctttttagactctaattccttttttatctcatcaggtgttttggtttgatgtgctggttttaataacgtgcttaaatttttacttttgatcaaacttccaccaaattgataatgatgttctggagacccatatgcaacaaaatcatcttttttgttttcattgatgtaaccttcaattacagcatcgcccataggtcctctttttaaacttgtgaaatgtacagttttgatggtattgggttctttagtattatgcttaagatagagtgtaatacgctcctgttgttctttatagtatattgctttttgtttttctttttcgtcatatttcacttttaaataaatgactgatgcaaatatacatatacataatatgacaccaataattataaaaacatgttttttgttcattaaagtaactcctaaaatgtggtggaaaatgaaaaagtttttgtaatctgtaattatggacattatagattataaatcataacactaatatcgtcgtcccattcattaacttgattgttaaaatcaccaattactatgaattgtacaaggaataattctctatcatgcccttatatcattattgccttactaacattaacaaaatcgatatctgttacattaaacgcctatcccccacgtctcaaacacctttttatacaggacgcactgtaatttcattcacattaacatgactcggttgtgttaatgcatacaataccgcttccgcaatatcttgtggatcaagctttttacgatcacttggattatatgcggcagttattgctgtatctaccattcctggtgaaatgcttgttactttaacgcctgtctttgccaactctttttctaatccttgagtaatggtatgaactgctgctttcgtcgcactataaatcgtactacttttcgttacttcaaagccagaaatagatgcaatgttaataagatggccacttgattgttctaacatagttggtaatgcagcctgtgccgtatataaagtgcctttgatattcacatcaatcatactatcccactcatctacttgataatcagtaatcttagacgataacatttgtcccgcactattgataacaatatccaaaccaccgaatgtttgttgtgcaatttttatcaattcatcgacttcttcttttttcgttacatctgttggcactaccttcacactatcttgagctaattgattcgccacattttgtagtttatctttatttctacctgctaagatgactttcacaccttcttcatgtagtaatgttgcaattgcttctccaataccactacctgcacctgtaactactgctactttatctgttaatactgtcataatgatcgactcctttgattctttttattttttcagggtaaatcataaatacatattacttttaaaaagcgtatcacaattcatataacggtcataataactcgcttcattttcatggataaagtacatttcaagccattcgaaatatataattaatcgttgcttatattttttatttttaaaaatgttgaaaaatcgtcacttctttattgtaaaaacattatattagtactaaagttaatactgtgatttatcattcgattgaatgattagagggaggaataaaacgtgacatatcatgagcgtgttttagcattaagagcagaaagtaaaagaaccgcatttgattttcgattcgaagatttatttagcaaagaagaatggctaagtatgtcgcttgcagaaagacaaaaagctgaaaaagcatttcgacacgaagttaaaaatatggacgatgtaagaatgcccttctcaagtgtccatgacgcccaagtaaaattatataatgttgtatattcttataacggcattaaacgtaattttaaacaagttgaaaatgaaggattctaatatcatttcgtttatatatagcagacatgatagaattttatatgtaaatcttgtaggtaatcgttttaaaaataatataagcatgactaaagccacatccaatataggacgtggcttttagtatcgttccagatttgtggggagttagggtttacttaattaaaggggtctgccctcaattgctcaccaacgagggcaagttacatcaatcacacttcaattgccgccgactaggggtagtaatcattggcaataagaactagttagtgactaacgatttacgttccatagcaaagtgatacaaacgctcagcatcaatgtaaggcatagaatcaatagttaggtaaccatctttgatgtcaccaattaatccttgatttacaccagtgttcacgtaaatatcatagctacttacgtctgagaaaataagcgcttcaatctcttttctcataatcatcactccaatgtttatatattatttatataaactctctcgtctctctctatttattaacttcttacaagtctaatattacatgaatttccaaataaataaagagttttgtgatgtatttcacaaattcatcactattttggaaaattaagaaatatttaattatataaaagtttaataagtaagaaaatatgataaaatgtagatgttctttagacattaaaagcttctaacatgatatggaatccgagattccgatatcacattagaagcttttttgttgtggtgattatattgataatggcatgaatgaacacacgctgtcttagtttctggaatcagctagaatattaaatttccgttttttgaatattttttaacttcttactaatatcatccagttcattcttcgcctttttaacccaatccccttgagctacattatcaaattcacctttaaattttttgaaatgactacatatttttcatagctcactttagatatcgagcttgtttcttcagagttacttgttatattatcaggttttatttgatattcagtttgactcataccttgtatcctcacttggagtatattgtacagaatctgtaaaataaatgttttcttctttattttcgacaaaggtaaattcaagacttctagaacctacggatgaaccttttaaatcgccatcgcctttcaataatagtttcggcgcttgtttggttggaatatcatatctttttcttaactgttggacattataatcatcattattcaattgatattttgccgaataacttggtacattaggattatatgaaatatcaccatctttataatcattaatatctttaaagttgccatattgtacaaagaacttaaagttttcaatctctttttttaacttgtcattcggtagtggcttcgttggtatgattttattatgttccatttttaccggataccttttttcatcatcctttggtctgccgttactgtcatctgtcatttcacttataaaataatacccttttgtggttctagtattgcgattgatatagagcaccattcctctcgtttccatatccttaccttttgactcgattaccatttcagaattaactatccaagtacctttatcaccctttttaaattcttgatctcgaaagccttctttatcgtaaaaatcatcgagatttttggttggatataattttaatgtttgattaaatgtgtctttaatttgggcgtttcgaccattttttttgtcataatgacataacctacaatcaatataatgagtaataccaagcatataccgagcgttaatttctttgaatgaatcatcatttctccaccttatatttttaatattgactcagtttttaatatttacaactaaagcgaaaaattattttgaacactttatgaaattttcatttcaaacttctattaactctattcagtaggtttgaaattaatactatcagaaaaatacacattttcttctttatttcttataaagttaaattctagttctttagaacctacggatgagccttttaatcgccatcaccttcatacagtttgaagtcatatttaccaattgtaaatgacgactagatgatatatagttcaagaaacatcaaaattcgttaaaacataatcaaattttattatgttcaaaactttattttccaaaaaataaaaaagaggttaaacaaagattggttgcttaacttccattattgaattcattagtccgatttgacatagatcccgaaaaataatggctaatagccacttatagtcgaaattatgaactatataattcatttattattaaatggattatatacttattgtgtttattaatacctttttatactttaatatcttgaattttttctaaatcattactaatatcttttaattcgtctgtggcatttttcacccaagccccttgtgccgcatttttaaaatcatcttcaaattttttgaaatgacttaccatttggtcaagtaatattttctcatcacttttcagcttattttgatgatcatgatgcatacgaacatgttcaggcgcaataacctcactaatctgttctttttccttcatttgttccaatactgctaaatctggcaaaccactaaaatcaagtcccacgcttattcatctccttcaattctgtcagattgttttagatattctcttcttaactcatctttataatcttctaatttcatttcgtgatgtcggatacgttgattcgtttctctatcgaaagattctataatacgtgtcatcctgatcatagcgtcttcactataattcattttatgtttgagatataagaaatgatcatacatttgttcacatttcttgcgtgtttgatgtcttaattcatcaatttgattgaatgcatcattcaattgttttctttcttcatcataggcattttcaagttcattaatatttttatacgtagtaaacattacatcatcccatcaatctggctcgctaacatttggtcattagaaacaattgcttcgatactctgtttaatttttgcgatatagccattacaatttttataaacatcatttaatttctttatcttatcatcaatttttcttttgggatctgtttcaagtttactttcatacgcgccaccttttcttaattcatctataacctcttcagaggttattttttcaccaatttcatttccaacttcttgcgcttttttccagttgtctccaaatttatgtgccatcgcgtgatacatttttttcaaatgttggctttcttcattcactaattgatttaagccttcggcaatggttagtgctgttaaagcttctaataattgttgttgggaggaagagagtgatccacccgttgtttgaatccaattcgctcttaacgtctctactttatgtaatctatgcctcgtttgtttacgaacggattttaatgctttattattttcgtcttggtagcctttaactttgtttaattcagctaagattatagcctgtgttctgctcattaaaataccactcattgcatggccttctctatttttaagtactattttttctccagcagtttcatataaatgattgcggacacctgcatctaattcgtcttcatcagacacaaatcttacaatgtgaccatcgtacttttcaatcaattttttaagttcttcttgatcggcataaaggccgctcacatctttgatcgctaatggagctggattatacacaacgatatgtttaatatcattactcatacctaaaatcatcgcatctctaccgcccagcgaatgtccggtaataatatcaatatcatagtcttttttgatatttttgataaagtcttgggtatttttataatgtggatctttatctgtgacggaatgaaggccaatattgacatcggccccaatatcctttagcgtttcactcgcatctatatatccttgataagaaggaacaccaaatgtttgttttaatattgcgtctttgtgtacattagtacctgtcatacctaaagtaactttgccagtgtctttatttaaaaaggcgcttgtagtcgtacctgttttggggtccgtataacttttaagatatgaaagatttttagggaaactattttgtgattttaatatttctatttgcgtttgaatacttgcattatttaaatcgttattatttgcgttttctatttcataacttatactagatattgcgcttgtttcttcagagttactctttatattgtcagaatttatttgatatttagttttgttcatgattcatttcctcagtaggtttgaaattaataccatcagaaaaatacacattttcctctttatttcttacaaagttaaattctagttctttagaacctacggatgagccttttaaatcgccagatcctctcaattttaattcaggggcccttttggttgatatatcatatcgttttcttaattgttggacattataatcatcattattcaattgatactttgcggaataacttggtacgttaggattgtatgaaatatccccatctttataatctttaaaatctttaaaattcccatattgtacaaagaacttaaagttttcaatctctttttttaacttctcatccgttatgggcttcgttggaattattcgattacgttccatcttgacagggtattttttatctttattatgaacgtatccttttttgtcttctgttgtctcacttattaaaaaatatcccttagctgttctagtgttacgattgatgtaaagtaccatcgctctggattttaaggctcctccttttaattggatgtacattccagaattaataatccaagtccctttatctcttttatcaaattcttgatctcgaaagccttccttatcgtaaaaatcatcaagattcttggttggatacacatttaatgtttgattaaatgtgtctttaatttgggcgtttcgactatttatttttgtcataatgatacaacctccaatcaatataatgagtaataccaaacatataccgagcgttaatttttttgaatgaatcatcatttctccaccttatatttataattctgactcagtttttaatatttacaactaaaacgaaaaattgttttgaacaaatgaatttaattgtaattattttgtattttaaatcttcttatcagaattataaaacaattaaatcaaaagataaagtttctgtgatttattattaattttaagagttatcgttataatcttttacctagtgctttatgaaattttcattccaaacttctattaaccctattcagtttgactcacgatttatcatcctcgcttggagtaaattcaaccgaatctgtaaaatagatattctctcttttattttgtacaaagataaattctaagtctttagagcctatggatgaaccttttaaatcgccatcacctttcaacaatagttctggtgcttttttagtcggtatatcatatctttttcttaattgttggacattataatcgtcattacttaattgatattttgccgaataacttggtacgtttggattgtatgaaatatccccatttttataatctttaaaatctttaaagttgccatattgtacaaaaaacttgaagttttcaatttctttttttaactcctcgtcttttataggttttgttggtatgattttattatgttccatttttacagggtatttctttttattatcaatgggtctaccatcgttatcatctgtaatttcattgacaataaaattaccttttgttgtcctagtattgcgattgatataaagcaccattcctctcgtttccatatttttcccttttggctcgataaccatttcagaataaatgatccaagtacctttatctcctttttcaaattcttcgtcacgaaagccttctttatcataaaagtcttcaagatttttggttggatataattttaatgtttgattaaatgtgtctttaatttgggcgcttcgactatttatttttgtcataatgacataacctacaatcaatataatgagtaataccaaacatataccgagcattaatttctttgaatgcatcatcatttctccaccttatatttttaatactgactcaatctttaatttacacatctaaagcgaaaaattttttaacactttatgaaattttcatttcaaacttctattaaccctattcagtaggtttgaaattaatactatcagtaaaatatatattctcttctttacttgttacaaatgaaaactctatatttttatgtcctacagacgaaccctttaaatctccatcgccttttattattaatttcggagctttattggttgggatattatacctttttcgaagttgcttcacattgtagtcatcattacttagttgatactcggccgaataacttggcacatttggattatatgaaatgtcaccatttttataatcattaatatctttaaagtcaccgtattgtacaaagaatttaaagttttcgatttcttttcttaatttatcatcagctatcggtttggttgggataattttattatgttccatttttactggatattctttttctttactacgtgagtatccttttttatcttcccataattctctcacaataaattcaccttttgtcgttctagtattgcggtctacatacaggaccaagcctctggattccatattctttccatttgttggaaatgataatttaataatgtacacttttgattgtttaaacatgtacaatttttaaaaacctatagataattttattgaggtgaacaacaatgaaattatctttagacataaatactgattttgaagttactactcttacagatttaccaaaattaaaaattgttatggagaacttaaacatgaaaataaacaaaagtgaaatagcgagacacatggatgttgatagaagaacagttgataaatatttaaatggctttgagccaaccaaaaagagaaatcgtcagtctattattgacaagtattaccctatcctagaaaaattactttcagacactagtgaacaaaagttctactataagcttattctttggcaatatttgaaggataaacatgggttaacgtgtgcctattctacatttagagcttatatccttaaacatgatgagtttaatcgttattttatgaaaggttatcaacggatgtcgactaaaggcacaacgagattcgagacaaaagccggtcatcaagcacagtttgactggaaagaaggcattaactttaaaacgaaggataatcaaatcgtttcactaaatataggcgtactactacttccttattcccgttttgtaatcatgcaagtgacaatgaataaatcaagtgatgtcttatttaatttattgacacaagcgtttgagctaataggaggtgtacctaatgaacttgtaacggataacatgaaaacggtcatggatcaaccaagaacagaacgtacaaatggtcaaataaatcgtagatttaaacaattcattgatgattttaattttaaagtaaaaccttgtattgctggccgtcctagaacaaagggtaaagtagaatcgataatgaaaatattagatgaaattcatgcatatcaaggcgaattatatttggaagagattcctaagtttatttctaatcttaatgagcgactgaactactcatttcatacgagtacaggtaaaatacctattattgctttagaaaaagaaaaaagtttcttacaaccactaccgaatgtgaatgtaagaaactcatataaagtgaaacataaatatttgaaagtcaaccactctaatatgattacatataagtccaatcaatattcagtaccagctgaatattgtgggaaaatagttgaagttcaagtttatgatcaaaaactacacgtttattataacactaaatcgatttgtgaacatctcatcacacaacgtaaattaaattatcaaaaagaacattatttagaaacactgtcatcttcttttggaaatagagaaatggatgatattaatcagattacgatagataattttaatgcgattggaaagttgtatgatgaataattcgacgaattataagcgcttaaaagcgaatttagaatatttgaaaatgaatcaaatgattattcatcatgatgatgttatcgattttagtattaaaaacaacctgtcatttatagatacactaattaaattaagcgactacgaaatcgaaattaaagagaaaaatttgattgaatcgatggtaaaggtggcggcatttccgtttaaaaaagaaatatcagactttgactttaattttcaaccgagcatcaatcaacaagaaatttgggattttacagatttgcgttttatagaaaaatatcaaaacattgtctttttaggctcaagtggcgttggtaaaacacatttagctacaggcattggtatggctgcagctaaaaatagagtaagtacttactttattaaatgtcatcatttgatagagaatttaagaaaagcaaaacttgagaacagattagaaaatagattgaagcactatagcaagtataagttattaatcatagatgagattgggtacttacctattggaagtgaagatgccaaactattctttcaattaatagatttaagatatgagaagaaaagcacaatatttaccacaaatatcaatttcaacttatggaatgaaatatttgatgatcccaaaatcgcaaatgcgattttggataggatattgcatcattcaagtgtagttaaaatcactggcaaatcgtatagattaaaagatcattcgcctaagaaggaaattacttagcaaacaattttgtacattcttatacaatcatttatgtacatttttatattgacatttacacatttgtttctattgtcattttagagtgaattatccaagtccctttatctcctttatcaaaatcttcgtcacgaaaaccttccttatcataaaagtcttcaagatttttagttggatacaggttcaacgttttggtgaagttttctttaatttgtttatctttactactttcttcttttttcattccgcaagcccctataaaaacagatagtattatcaagcatagacacaattttaacctttttgaatgaatcatcatttctccaccttatatttttaatactgactcaacctttattttatgcaacaaaaaatattttgaaaaaatgaatttaattataaatattttgtattccaaaacttcttataagaattataaaacaattaaatcaaaagataaagttggtatgatttaccataaattccaggaattatcttttacctaattagagctttatgaaaatttaattccaaacttcaattaaccctattcagtaggtttgaaattaatactatccgtaaaataaacattttcttctttatttcttataaagttaaattcaagttctttagaacctacggatgatccttttaaatcgccatcacctttcaacaatagttctggtgcttgtttcgttggtatatcatatcttcttcttaattgtcggacattataatcatcattacttaattgatactttgcggaataacttggtatgtttggattgtatgaaatatctccatttttataatctttaaaatctttaaagttgccatattgtacaaaaaacttgaagttttcaatttctttttttaacttctcgtcttttataggttttgttgggataatttgattatgttccattttgacagggtattttttatctttatcatgtgtatatccctttttatctttagttatctcacctactataaaatatcctttcgttgttctagtgttacgattgatgtaaagtaccatctctctggattttaaggctcctccttttaattggatattcattccagaattaataatccaagttcctttatctcttttatcaaattcttgatctcgaaagccttctttatcgtaaaaatcatcgagattcttggttggatatacatttaatgttttattaaatgcttctttaatttgagcgtttcgaccatttgtttttgtcataatgacataacctacaatcaatataatgagtaataccaaacatataccgagcgttaatttttttgaatgaaacatcatttctccaccttatatttttaatactgactcaatctttaatttatacatttaaagcgaaaaaatattttgaacactttatggaatattcattccaaacttctattaaccctattcagatggtttgaaattaatactatctgtaaaatagatgttttcttctttacttgttacaaaagaaaattctaaatttttgtgtcctatagatgattcttttaaatcaccatcaccttttattattaatttcggtgctttcttagttggtatatcatacctctttctaagttgtttcacattgtagtcattgttactcaattgatattctgctgaataactaggtacatttggattatatgatatgtcaccatctttataatcattaatatctttaaagtcaccgtattgtacaaaaaacttaaaattttcgatttcttttcttaatttatcatctgttatcggtttggttgggataattcgattatgtttcattttcactggatattttgtatctttactttgtgcataccctttactatcttcccacaattctctaacaataaaattacctttcgttgttctagtattacaatttatatagagcaccatacttctagattccatttttttaccctttagctcaattaccatctcggaatcaacaatccaagtacctttatcacccttttcaaattcttgatctcgaaagccttccttatcataaaagtcttcaagatttttagttggatacaggctcaatgttttattgaaactttctttgatttgtttctcttctttcataccacacgcgctaataaaaacagctaataatactaaatataaacagagtatcaactttcttgagtgaatcattatttcacatccccattatttatttttgatgcaaaattaagttcaaattccaatattaatattactagagggaattttatgattgaaacatcgtagactttaattgttagttgtattttttcacatatcaacatcacaaattatttaaaaagcgcaaatatctttataatttttattggcctaaccaactaattaattaagataaattgcgcttatatttaaaataataacactgaaactcaatgtctttacttattaaaattgatgtttaaatacatctttactaacattcatttttcggtttacattaatttgttagatagcgatatatatcatctcttacagctttatcgagtgctaaatccatcgttactacgtttgaaccattcggcattttatcttgcttctctgaaccttctatatatccagcagttcctaaataataaaaatatataccatcatcatcttttttctgtacaaaaatatacattttaattccttttgctctatgggacaaaattttctgaacttcttttgtttttagcgttctattagatttagtaaaccattttaattcatcttgacttaaaaattcatcttcatattttgtgctatcacttatatcctcatgcttatcataagtgataaatattggcatttcttggctttttatcatgtatcccatgattacagacgaaccatttttattccaattaaatattttactaaaatcttctcttgaatatttattatataaaatcagtccatttttacctttttggtatttttcattgttatactttgataattcaataagatcttctaaaaacatattaaatgtttgattacttagagcattagtaaatgcatcgcttagtcttatcattctttcattacgttctataatgggacttccatagattttttcaattcctgcgttgtaaaatgaaaaatctaaaattcttaatgaagtatctatatcatcttctgttatatccttaacttcgttcaacattttattttttaattcatcatatgttaattcattttttaaaagttcttctaaaactaaactatcgattcttttcaatccagatgctatttgccttgaaaagaaaaccagatttttagattcattttccgtcaataaagcatctatttttttataccatactaaaaactcgtaataattactaaatttagaaaatataacgcttggatctatagaatgttgttgtataaaatccattagtaacggcatgtgtcccaatctattttcaacttcttcataagcttttaataataatttattttgattcaatgatactgcatccaatgaattgtaaatctgttttttagcaacttcttcaaaattaattgtagatactccattaatcgaatcgttattcgttaaaaacttcttataattatctttattttgcgattgatctccagaaagcgcaatcggaattaaataattggtcttataattaccaataaaatcaattacagtaacatactctttatttgcactttttcttaaccctctaccaagttgctgaatgaatataatactagactcagttggtctcagcattacaacttgattgacttctggaatatcaataccttcgttaaatagatctacagttataatatagttaatcttaccttctcttaatttttctattacaatttggcgataattaacactatcgtctcctgttaaagcaacacttttaatcccttttgaacttagtttatccgctaaatcataagcttcttttttgctacttacaaaaattaatccttgtaaaatttcacctgaatatccatagtaatctgtcttttgaataatataattaactctttcatcagaagttaaatatctcagtttagttacatcatcttctttaataccttgatgtacataatcagtcacaccaaaataatgaaatggacataaaatatcactttctaatgctgcttgtaaccttatttcataagcaatattataatcaaacatttcaaatatacttaattcatctgatctttctggtgttgcagtcattcccagcataaacttaggtttgaagtaattaaatactcgttgataagtagatgcagcagaacgatgtgcttcatcaaaaacaatataatcaaattcattttcatcaaattgcttaaaattatcatctctagataatgtttgaatggttgcaaataaatatttggcatcgacatctctatgtttgcctgtcaacaatccaaaatcactatcattttttgtaggtaatacttttttaaattcttccttagctctatttaaaatcccctcattatgaacaataaataaaaatttattagggtttacttctctaacatctaatgcacataaaatcgttttacctgtaccagttgcagatattattaacgccttatctttggctttatccctaatagcttttaatgaccttaatgcttctgcttgcattaaattcggtacaatttccactgattttttcaccttatcagctagcagcatttgagtttgttcaacctccgccaatttttctaaggagcggtactcaaatgattctttatatgaattaatccattgctgagtcagtggggtactgttttgccataacaagtcaaattcattttttacactatcaaccaaatccccatttttcatagtagacagtaaaacattatgctcataattaacctttaacgcattcgatgttaaattagagcttcctattaccatagaactataatccttatgttcaaaaatatatcctttggcatggaatccagcaatatcagttaatcttacctctacattttttaatttaagtaattctccatacattttaggactattaaaccctaagtaatttgatgttaatattttccctttaacacccttattgcttaaatctaatagctgagcctttaagctggctaacccgctttctgttataaaagctacagaaaaatagaacgtttcacatttttgaagttcatctataattgttgaaagaactttttcatttttattatttactaaaagcttcggtgtataattccctttatgaggaatatctttgtctataaaacctttttttaaagattgattgaaatcatttagtaatctactcatattatccctcagtcataattttattaacggctggtatatctgctggagcccaatttaatttatcaagttcatttataggcaaccattcaatactcttatgttcaattagagttggtaactccttgttcaaattacatttgtatgttgttaacttaacaatgccaaaatcatattcatgttctgtagttataactttgtcaccaacaattagatcacatttcatttcttctctaatttctctaatcaaagcgtctttttcagtttcattcttttcaaccttaccgccaggaaattcccacattaaaggcagactcattttttcacttctctgtgcacaaagaattttgttatcagaaaaaataatagctcctactacattgattacttttttcataagactcacccttcaaattaaaatcatcttaattgttattctatcaaaaattacaaaactatatataaagcaatattaaaaattaatattttacattcacatgcacactctactccatgcattttcatacacatctattatataatacttgtgaaaagtattgtcttggggctgtgttttttacttttggggcgtatttctttataattcattacataaatgtaagggctttagttttcatgttttattaagtctaactgagattttgaaaggatgtttagcaacaatggataaagaattatggatagaaagagctaatgatagtttagttaaacatttttatgagcagcaatctgacattgaacagcgagaaggttttgaaagtaaattaacgtttggtactgcgggtatacgcggaaaattcggtcttggtgaaggtcgacttaataagtttactattgaaaaattggcattaggtttagcgcgttatttaaatgcccaaacaaacaatccaacaatagtcattcattatgatattagacatctttcaactgaattcgcccaaattattgctaatgtattagcaaaccatcaaataacagtttatttacctgatacatataaaacgacaccggaattatcgttcgcggtgcgcaatcttaatactactgctggcattatgattacagcaagtcataatccgaaagactataacggcattaaagtatatggttctgatggcgcgcaactatcaacagatgcatcagaacttgtaagtcgctatattgaagacgttggcaatccattacagattgatatatctttttcaaaacacaattcatcatatatcaaaccattacctaaatctgtaacagaaaattacattaaacatgttcaaaatatgattggttatattcctaaatctgatttacaagttgtgttcactagtttgcatggtacaagtgttccgattgtacctaagttattaaaatctttgaatttcaatcaatttaatcttgtagaagcacaatgtaaacctgatccgaatttcagctcagttcaaagtgctaatcctgaagatcatcgcgcttttgatcaagcagtcgaacttgcaaataaaagtcatgcagacttattaatatcaactgaccctgatgcggatcgacttggtattgctgaacgtgatgcacatggtcatatcacgtattttaatggcaaccaaattggtgcgctgttacttaattatcgtattcaacaaacgtctcaattacgtcaccgcttaatgattcaatctattgtaagtagtgagttaacaaagtcattagcacgctataataatgttgaatacaaagaggtgctgacgggctttaaatttattgctcaggaaataagacaactggacgatcatcaaaatatgattttcgcctttgaagagagttacggttttctatcagaaccttttgtacgtgataaagatgccgtacaaattgtgccactcattataaaatacgcttctgagttaaaattatatggcaaaacattgaaagatgaattagaacagatttatcaaactgttggtagacatgaggatacattattctcgcatacgctagaaggattagaaggtaagaaaaaaattgaatcaattatgacacatttccgttcaaatccaccgcaagagattcaaggactgaaagtgaaagcaattgaagattatttaactagcgaggtttatcagttggataaagatacaacgtcgcagattaattctcctaaatcaaatgttattcgtgtcttatttgacgaaggatttatcgctttacgtccttctggtactgaacctaaaattaaattatatgtgtcgttaaaatgtccgaattttgatgatgtagctcaaaaaattaatgcgatgatttttagctaattaaaaattttatacatcgaaatattacatttcattttatacttatcagcccttttgaaactagaatccttatgttttcgcgttttgaaggggctaatttgtaataatttttcaaaagtatattagaaaattaattttcatgtatttttcatattaagcggtaataatataataattaataccgcgacctatttaattgttttcgcgatgaaaaaggtttagaattacaaaaataactattttaaatttagttacaaatatattttagaaaggatgtgaaataatgaaaggctctaaacaaatacttttgattatgggcattatatctcttattgttttatttatttttacactattcatcatggcgcaatatgcaaaacattatgaacaaaaatccgacagttccaacgcacatactttaaattcatcatcagtcataattgagcaacatactatgtcgaatttagcgtctctagatttatacgctcctgttcgtaacattacttctagtcgtgatattcatcccatttatttcatgacaaaagattaaaacttcctttttcataaccccattcattcaactaataaattaaaaaatgataaaaacgtactgttttttagaaacatacatatataagaaacacatccattactaaaagacagtacattatattctatcgggaaggtgcaacaatgaccgtcaacatcgtatttagtatcgtattctgcataagtatggttatattaggcatttatgtcgcaataactaaagatttcacactaatttcttatataaatcaaacgaccattgcagataaacacaagaaccaaattgcatatatatttgcgttatgtatcagtttgagtgcagtatttttaatgtctgcaattctatgctttgaatatgattttattgcattgtcattcttatttttaacgatagcattattacttatcgcattattctatgtttgcttttataaaattacaaaatacccgtaaatgtttgtaatagtgtgttggttagatttaatggtttactgccaataagcaattgtttgcgaaaaaaatacaaccttgtatgaatacaaagttgcattaatatagaatcatttatgctttttaatgtcacaaaataaattgattaaactagctaaaatagtcaaaattggaatcaagattacataaatatcataatctctagatattagtatacataatataattagcgaccctattataattgctaaattataagccaaactaattttatatttcatttcaattcccaccttaatagcattgattaaaattctattatgtttacatagacttcttaaaaaactttaacccagctaagctaagcatcgaaataattgcacctcctgatataaatatattacttaagcttagcaaaggtataattaaacttatcagtcctaaagacaatgtatccgctgcgtaattcgatgtagatgagatactaaatactttccccatcaaatgatttggcgtttttatttgaatggcaactgatcttgttagtccctctatagattgtccaagtcccactaaagttgcacctatatataatatcgccatacttggaaacacattaattatcgataagccaatcccccaaactaaaacaccaatactaaatttaaagattaatcgtttttctgacagcaaacccataatcaatgacattagtaaagacgcaatacctaaacatgatgtagctagtccatatacaccaacgtcctcttttaatatattagaaataaacaatggtaatgcaacacgccaaaggccagtattaatcattatgcaggcaaattgaatgataatgataaatggaatttctttagattgtttcaagaattcccaagtttcagaaaattctttttttgagtgtctatcaatcatgttgttatttgtatattttaaaagtgcattaaaaataaatcctaaaaatagcaatatactgcaaataaaaaagacgccaacattaccaactagtattacaatgacaccaattaaagcaggtaaaataatatttgagcctctttgcaaactatcgattaacgcattacttgttgctaaatgctcctcctcaataatttcaggaagaattgccctaaacgcaggatccgtatagcagttaataatggtgatagctgtagatatggttagaagcgtcagataatttaaatttgatgttattgcaagtaaaggaataataattataatcaaacttagtataagatcagatagataaagtattttctttttattatgtttatcagaatatgcgccaccgaaaataccaaatataataaatggtagtgtttgactcataaccatcattgataattttaaagatgattggtttgtcaattcaacggtaaaccaaattatttgcaacgaaaacagcacaaagcaactccgacgtaagaaattaccaatcaataaatatgtaaagtttctatttttcaaaacttctaagtacaacatatttatcacctctcataaaaataattgaatgcatccaccagcctttttagttaagtaatttattgaagacaaatctccatacctatatatcacagcacataaattaagcatgacactcattcaatttagttcaccatttcgtgttccaattttattgagtatcatgctttttaatgttataaacctaattctttaataaatcgtgttaattcttctcgcatactgtcatctttcaatgcatattctatggtagttttaacgaagcctaatttttctccaacgtcataacgttcgccttcgaagtcatatgcatacacttggttatcattattcatacgctcaatcgcatctgttaactgaatttcgttacctgcgccttctttttgcgtttttaaataatcgaaaatttctggcgttaatacatatcgccccataatagctaggtttgatggtgccgtaccttgtgctggcttttcaacaaactttttcacttcatactgacgtccatttttagttaatggatcaataattccataacgatgcgtatctgcttccggaacttcttgaacacctataactgagtgccccgtttcttcataaacgtcaatcaactgtttcactgctggcacttcagattcaacaatatcgtcacctaataataccgcaaatggttcattgccgataaattgacgcgcagaactaatcgcatgccctaaacctttttgttctttctgccttacataaaaaatattcgcaagttccgttgaatactgaactttttctagtaattcagatttacctttttcttttaacaccatttctaattctttttgactatcaaaatgatcttcaatcgcgcgtttgtggcgacctgtcactataataatatcttcaattccagctcttgcagcttcttcaacgatatattgtattgtgggtttatctaagataggaagcatttcctttggcatcgctttagttgctggtaaaaatctagtccctaaaccagcagcgggaatgattgccttttttatttttttcaaagttaatgtgctccttttcctaagtattaaatctatgtatcaacgtcattttaacactaattagaacgccttcatagtgtcattgagtatgtaattatttcttgggaaatttgatttaattttaaaaaacaggcttacttcatataatttatgaaataaacccgtcaattttggattgattatggattatgctttgttattctttttatttctgcgtaataatgctaaacctagaatgctaaataatccgccgaacaacatacctttgtttgttgattcttctccacctgtttcaggtagttcagatttcttagattgtttttgtttagttggtgccactactttaaccttttcattgatttcaataacaggtgttactactttaccttgttccactggtttagaaggttttttaggttcttctttggcaggtggtactggtttaccaggttcagttggtacttctggtgtcggtggtgttggtgtttctggctcactcggcacttctggtgttggcggcgttgtatcttcttcaatcgtttgttgaccttcgttttgaccgcttacttttggaagtgtatcttcttcaaaatcaacactgttgtgtccaccgaattgataattaggtttatctttgtttgtatcttcttcaataatttcattatgcttattgaatccatgaatttgtggcacactatcgaagtcgatatcaatgatattaccaccttgttcatacttaggtttgtctttctctgtatcttcttcgaatgactggttaccattattttgaccatgaatttgaggtacactatcgaaatcgatatctacgatattaccaccttgttcatatttcggtttgtcttcttctgtgtcttcctcgaatgactgattaccactattttggccaccttcgtaacctaattcactcttaatatcaacgtggctattttcttcgatttcttcaatcacgccataattaccgtgaccattttcagttcctaaaccagaatgagaaatatgatgattgttttcagtaatttcctcgattggtccttgtgcttgaccatgctcttcaggtaattcatccactaattcaatcagattactttcagttgtatattctttcgtatcttcaactgttgtatggtcgctcactgcgccagttacaataccttttgtagactcttcgtcaaattcaactaagttagactcagtagtaacctgaccaccacctgggtttgtatcttcttcatattcaacaacatcagcgtgatgttttgaattttcatgtgttgattcttcaaagtctacatgaatagaatcttcttcagtttcaatggtaccttctgcatgaccttctgaaccttcaacagctgtatgatattcaaaatcaattggcttagaatcgtcactttcttcgattgtaccagtcaattcatgcttctccactggcggctctgatttaatgtctaaatcaattggttcactcttctcaatgataggatcatttggtttatctttaccatcgcctttagcattattagagtagaatgcaacgccattgttccaagttagttgaactggataatatgggtaataatagtaatcattataagcagataaatgagtttgtaattgtagagattctgacttagcatcatatgctccttcatatttgattacataatctttattattatccaaactttcaaaattaatagtatagccaccattattatatgaaatacttaattggcttgtgatatcctcatactgatcatttttgcttaaatcagcaaacacactttccgctaaaccttcttcccctgtatatttatacactttaacagtcggattgccaccatcttgtttatatccagatgttacttgaccagttactgtaacagaacttaacgattgattgttaggtttcacgtatgcaaaatggctaaatttaccttcttctttattcaaagtatgaattcgtccgttaacagtgacacccataggatttttaacaccatctaaatattggatatcaaattcttgtgatattttattttgccctaaagaaacctcaaccttttgctttcccttcttcgtcactgttgttgggtcaataaataggtttaaagataattcagcagttaaattttgcttttcatttatataatcagtaaatgtatagcgaattgtacgttcatttataacttgaccatttgccataacttgaccatctgtactttttatttctggaactttacgcagtgttgaaataccatgcgtttctacattattacttaatgtgaaatcaaagtagtcccccggttttatatcttcaccgaatttccatttatatttcaaggttactctttctgcattatgaggattaacgacattcgtatcttgtttatgtcctacaattttactaccattttctactgtaactttacttgttacatctgtacctgtcgcgttagcttcttccactacttctttctctgcaactgctgcaacgtcagctgatcttttcattcttggtttaatttctgaagcgttacttggttgagctgtgtcaacttgagttcctgtagtttccttatcagcaactttttccgatggcaaatcaactcgcgaagtttctacttttggtgcttgcacagttgttggtgcttcttctgttgttacttgtgttgattgtgatggttgctcagttgatgtcgcgctgtatgattgtgtttcatctattgtattaacgttatttgtagttgtttgtgtttcgcttgcttttctttcagtagctgaactcccactttcctctactgtagtattgttttgttccgatgctgcagcttctttttcttgtcccattccaacaacgatcattgttcctaagaatactgaggccgctcccaatttgtgttttcttatgccgtatctaagattgcttttcactataatattctcccttaaatgtaaaattcatttattttttaaactcaataaatgcaattctatattgttcggtttttaaaagcaatgaaaaaaagcgagttaataaaaagttaagattgttgttaactttatgtataatgagttttttattatttggaactcacatatatattgcatacaaagctcttgaacaccttgatataacgggcttgtattttttatacttactttttaaattaaattcaaattcatctaatttaaaacaatatactaaaacatacataataatcgcctgtacaatgcatcattaacaagtcactgaaacgcctttcattgtattaataacgtcactataatttttatatcgttcggtttttatttgattttaatgattatttatacagaaacagccgtatttcaagacgacattttaaatttaactaaatttgcatctagttaataattgcatttatcaaatttgtcttattgatccaatctaatttttacttacaaactagttttaaattctaactttatctctcattttgtaatcaatcatcagacataaaccaatgaagcgatcagaaaacactctaattttctattagaaatttgatttaatctaaaaaaacaggtttacttcatataatttatgaaataaacccgtcaatttttgtttaattatgctttgttattctttttatttctacgtaataatgctaaacctagaatgctgaataatcctccgaacaacatacctttgtttgttgattcttctccacctgtttcaggtagttcagatttcttagattgtttttgtttagttggtgccactgctttaaccttttcattgatttcaataacaggtgttactactttaccttgttccactggtttagaaggttttttaggttcttcttttgcgggtggtactggtttaccaggttcagctggtacctctggtgttggtggtactggtgtgcctgcctcacttggtacttctggcgtcggtggtgttggtgtttctggctcacttggtacttccggtgtcggtggcgttggtgtttctggctcactcggtacttccggtgtcggtggcgttggtgtttccggctcacttggtacttctggtgtcggcggtgttggtgtttctggctcactcggtacttccggtgtcggtggcgttggtgtttccggctcacttggtacttctggcgtcggtggtgttggcggcgttgtatcttcttcaatcgtttgttgaccttcattttgaccgcttacttttggaagtgtatcttcttcaaaatcaacactgttgtgtccaccaaattgataattaggtttatctttgtttgtatcttcttcaataatttcattatgcttattgaatccatgtatatgtggcacactatcgaagtcaatatcaatgatattaccaccttgttcatacttaggtttgtctttctctgtatcttcttcgaatgactggttaccattattttgaccttggatttgaggtacactgtcgaaatcgatatctacgatattaccaccttgttcatatttaggtttatcttcttctgtgtcttcctcgaatgactgattaccgctattttggccaccttcgtaacctaattcgctcttaatatcaacgtggctattttcttcgatttcttcaatcacgccataattaccatgaccattttcagttcctaaaccagaatgagaaatatgatgattgttttcagtaatttcctcgattggtccttgtgcttgaccatgttcttcaggtaattcatccactagttcaatcagattactttcagttgtatattctttcgtatcttcaactgttgtatggtcgctcactgcgccagttacaataccttttgtagactcttcgtcaaattcaactaagttagactcagtagtaacctgaccaccacctgggtttgtatcttcttcatattcaacaacatcagcgtgatgttttgaattttcatgtgttgattcttcaaagtcaattggatttgattcctcagaggactcagtgtatcctccaacgtgacccgcttcgctatccacagcagtatggtaatcgatatcaatagctgatgaatccgtttcttctattgtttcaatgtatccatcaacataaccaccttcaccatctatagctgtgtggtaatcaatgtcaagagttgaagaatcatattcttcttcaacagtagttactaaattcttatcatattgacctgtaataactccagttccatattcttcatcaaatgtcatattattcgattctgttattgttccatttgtgccatcgccttttgctttattactatataaaactaagccattatcccatgtaagtttgtatcctaaatgagtatagtaatacttatactgctgttctggatatccaaacatgtgtgttctgaagttcacttgatctgacccacttaagtattcaccgtcatagtgtataacataacttttttctaatttttcaatatctaatttatagttcccattattttctacttttaatttatctttcatttcctcagttacatctttaaacattgaagaatctgatacatttgcgtatacactttgtggtaattcattagcatcctttaaaacttcatatacttttacagtaggagccttcccatctgctttactaccttgagttaatgtaccagtaattgaaacgctatctgatttatgcccattttgtggctttatgtaagccacatgagtgaatctattatttcctttatcgaaagtttcaatagaaccatttacattagcatagctattacttactcctggattatattctattggcaatgtgttttttgtttccttatcattcaacgttgaagttattgtttgttgtccattgctttgtacagttttagggtcaataaataaattgatttctaaatcagcagtcacatttactttataatcaatataatctgtaaatgtatacctaattttcccatttccaagaagttgacctgtcgccattacgactgaaccatttttgatttctggtacttttctagctgttgaaactccataagtatttacattattagacaaggtgaaatcaaaataatcccctttgtgtaaacccttttcgaatttcaatttgtacttcaatactacacgttgaccagcatgtggctctactttatttccttgaggtgcttcaatcgaaccactctctactgtaactttacttgtcacatctgtgcctttaacttctgtaacgtcactagcttccttagcttccgctacatctgctgatcttgtcacacgtggtttactttctgataccgttcttggctgtgccacttcaacttgtgtttctgccacttgattttgtgtagtctttttaggcgttaaatctacttgtctttgatctccgctattgtcttgagattgtgtcgtttccttaacttgaggtttcgcttcttccttaactacctcttctttaactgtttctaaatttgctggttgtgcagtttgtggtgcttgtactgcttttggtgcttcttcagttgttacttgtgttgcgtttgacggttgttctgttgctgttgcgctgtatgattgtgtttcatctatagtattaacgttagttgtagttgtttgtgtttcgtttactttattatcagtagctgaattcccattttcttctactgtagttgtcttttgttctgatgctgcagcttctttgtcttgtcccatcccaacaacgatcattgttcctaagaatactgatgctgctcccaatttatgttttctaatgccgtacctaagattgtttttcactataatatctccctttaaatgcaaaattcattaatttttttaaacttaataaatgcaagtctatattgttcggtttttaaaagcaatacaaaaaagcgagttaatgaaaagttaagattgtcattaattttatgttaattgataattttattattttaaatatgcctataaattgtattcaagtcgtcagaaacccttgtcacacaaagcttgtattttttatacttatttttaaaattaaattcatcattatctaatttaaaacaatatactaaatgtttcataattatagcctgtacaatacgcacaaaaacatgtcttgaaacgcctttcattacactaaaataaccaatatactttttatatcgttcggattctgagtatttcagacgattttctgcataaaaataaacgtgtttcgaggcaatatattgtaattacctaaaaacacgtttacttaatatttagttaaacaaataagctgatgaataaaatgaagatgatacctgaaacggaaataatcgtttctaataatgaccatgttaagaatgtttcttttacagttaaaccaaaatattctttaaacatccaaaatcctgcgtcattaacatgagacaaaatcacactacctgcaccaatcgctagtacaactaatgcaacatttacatctgatgattgtaataatggtaagacaatacctgtagttgaaatcgcagctactgtagccgaacctaatgcgatacgtagcacagctgcaacaatccaagctagtaaaatcggagacatctctgtaccttcaaacattttagcaattgtatttccgacaccaccgtcaattaatacttgtttaaatgtaccgccaccgccaataatcaataacatcattccgattggataaatcgcattcgttactgattccataatatgattcatcttacgttttctcattaatcccatcgtaacgattgcaaataatactgctattagcatggctgtccctgctgttccgatcatataaatgatagattcaaatagatttataggtttgtcgtgcccggttacaagttgcgttatcgtagacactaacattaatataactggtaatgttgctgttaataaactcataccaaatcctggcatctcttgatccgtaaattctttttgtgcacctaacgctgaaatatcgccttctcgtgtatacgcagacggaatcattttttgtgcaactttgttaaatataggtcctgcaatgagtgtaactggaatggcaattatcataccatacagtaatacatctcctacattcgcctttaattcttttgcgatgactaccggtcctggatgtggtggtaaaaagccatgtgtcactgataaagctgttaccataggtagtcctagttttaacactgaaacatttgcgcgttttgctactgtaaatactaatggaatcagtaagactaaacctacttcaaagaataatgcaatcccgacgataaatgctgcaacaagcattgcccattgtacatgtttttgaccaaatttttggatcaacgtgtctgcaattcgagttgcaccaccaccatcagcaagtaatttcccaagtatagcacctaaaccgaatatcagtgaaatgtggccgagcgtactgcccatccctttctcaatcgtctccataattttagtcaatggtatacctagcattaacgctgtaatcatcgatgtgataattaatgaaataaatgtatttaatttaaatccaataattaatactaataaaataacgatacctaaaacaacactgattaacggccatatttcgttaaacatgacattcccctctttctcttttcaatagaatgtaacaccgtcgtcgcgcacgtattccacataatatatagtagtcatggcacaacaactttatctaagatgcttgagtgacgtatttattgtgttttattttcagccatatgttggcgttgaaaatctgcaatttgttcataattctctgttaaagaacgacttaaattgataaaaatggatacgagctcttgataaacagcgacattttctttaatcggcgtatgattgtttgtggcaccgaccatcgatgaaacgattgaaaaatcttcaatgtcacctacagctttaagcccgagtacgcaggcacctaagcatgaactttcataactttcaggaaccactaactctgtgtcaaatatatctgacatcatttgacgccatacttcacttttcgcaaaaccacctgttgcttttatcatcttaggtgtttcattcattacttcaataagcgcaagatagacggtatacaaattgtaaagaacaccttctaatgcagcgcgaatcatatgttcttttttatgagataaagttagaccgaagaatgaacctcttgcatttgcgttccaaagcggtgcacgttctccagctaaatagggatggaatattaaaccatctgcacctggtttaacacgcttagcaatttgagttaaaacatcataaggatcaacaccgagacgtttcgcagtttcaacttcgcttgctaacaactcatcgcgcaaccatctcaatacgacaccaccattatttacagggcctccaatgacgtagtggtcctctgttaagacataacaaaatattctacctttgtaatcagtacggggtttatctatcaccgtacgaatcgctccagatgtaccgattgtgacagcaacttctcctttaccaacactattgacacccaaattagaaagcacaccatcactcgcaccaataacaaacggtgtatcttcattaagccccattaatgttgcataacgttctttcatacctttcatcacatacgctgttggcactaattctggcaacatttcctcggaaataccaagcaattctaatgccccaacatcccaatctaatgtttctaaattaaacatccctgttgcggaagccattgaataatcaatgatatatctatcaaataaatgatagaaaatgtatgttttaatatctgcaaacttagcagtacgttgaaatacatcttgccattcatgtttcatccaaaaaatcttcgctaatggcgacataggatgtataggcgtacctgttcgctgataaatcgcattgccatcatgcacttcatttattactgttgcatattttgcagcgcggttatctgcccaagtaatattatttgttaatctttgatgttgctgatccatcgcaatcaagctatgcatttgcgcactaaatgatacaaatttaatatcatcttgattaactttcgattccctcattatgtatttaattgtcattaataccgcatcaaataattcatctgggttttcttctgagacatcaacgtttggtgtgtgtaaatcatagccgatttgatgtttcatgatgaaagttccattttcatcatataagactgacttggtactcgtcgttccaatgtcgacaccaatcatatatttcatgacaaatccttctttcttttcattttaattcaaccaaaatccttcaatatctttaccaacatcgtcgaaatttaaatgaaacgcttctttcaaaatttgactgtcgtattgttccactgcatcaataaacacttgatgattatgatgtatgcgttcaaaatcttgcgggttctgttgcatacgttgtcgcatggatgttaaaacgagtgccatcattactggttttaaatgactccaaaatgagtttaaatattgatgattagatgctttgattaatgtttcatgaaattcaaagtcatgcttcgtaaatgattctgcatcctcaaattttactgccactttcatcatttcaagttgtttcttcatttcttttacgataggtagtcgctcttgatttttaactcttgaaaatgcaaatgactctaacatcaatcgcaaatcgtacatttctttcttttcttgttccccaaacggcaacacatgtgcacccattctttctaattggatgagttgattttgttgcaataatttaaatgcatctcgaattggcgaacgactcacattaaattgctttgccatttgattttcagtgagtaacgtaccttcagctatgtgaccattcacaatgcctaagcgtaattctgctgcgataccttctccagttgtcataccttccaaccatttctctggatatccatacatcatcaaagtcactccttcattacacgacatacttgtatacaagtatgttaatatagttctcaagcgtttgcaagcgctttctttacgcgtactaaaatagtgaccaccccttttcgatgtaaatttaaagggaatggtcactatcacacgaatgatttaattgttatgttgtatgtgggatatttctaattgttctgtactcatatgcgctttaggtacttcaatgcaataatgcgtttcatgacagtttggacattcgaatcgacgtgttgtcgctgtatgtttcgctttgataactgcccacaaagacggtgagaatatatgctggcagttaggacataaataggcaaccttttgttggtaataaaaagtaacaccaatgccataaccgatcataaatggtaaagcaattaagaacggccatttatttttcatcaaaattgcgcttataatgctagaatattgaattattcctataataccagcactaatccaaatgttacgacgaatacttttcatttcagctgatttactcatgacatgctctatgtcttttaagtgtgtgattggagacgtcgacgtttcatttacgtaatattgaacatttttaattttgtttaataccgcttgttgctgtttgacttgttggttaatttcttgttgtttcatagttagtaaagtattgagcgtcttcaaagtaccttcaccttttagcaacatatctatatcgcttaacgcacaacctaaatctttaagcaataagattaactctaatgtttgtcgctgttgttctgtatacacacgacgctttccttctgtaaatccttgtggtttcaaaatacctttgcgatcataatattgaatcgttcgtgttgtcacattgcataattttgcgagttctccagtcgaatagttagacatagattccacctcctacaatcaccatagttgatgacccgacgtcacgagcaagtacaatttccacattttaaaggaatttattatactaggcgtcttatttttgtgatttcgtaccatgttgatttacaaaatcactcaaattaagcaacactcctactaaacgtctactctgttatttcagaatgaatttgttgtaatttatcttcaacttcagtaatctctgtcgcacattctttcaataaatctcgatacttttccgtctctgcattgtttttataacgtattttatgttctaaacttgcccacatatccatacctatcgttctaatttgaatttcaacaggcaatacctcaacgcgttctgctaaaaagactggaatggatacaacgatatgtaaactgcggtaaccattttctttagggtgctgaatataatctttacgttttatcaattgtacgtcttcttgtttaagcaacatctcttcaatcaaataaatatcatctaagtaattacatactacgcgaattccggcaatatccagtatgtgttctttggcagtttctgcgctaatctgtaatcctttacgattaagcttttctattaaactacgcatttctttcacacgtcgctccatatgatgtataggattgtgtttataaatgtgattgaaattgtcatctaaaatactcagtttagtgcttatttcctttagtgctgatgaataaatatgatctaactctacgaaacctaataacgtatcaaatgcttcatcaccattttcaaatttacttaaactatttttaaaatcatgtcgcaaatcctctaaatataatgatggttttcgatctacatacatttttatacttacctccgatatataatcatctttattgtacctaacattttattaagataatactaatacactatcgaactttgggctgatactgaaacagcacaaagaaattcaaacaattcgaattatgtatcaaaaccttcaattataggaagtgattttaaaatgatttaatgcaaaaaaacacctgttaccgttatataggtacaagtgcttaattgatagagatgttatacgtctttaaatgattccacaacttttggatgtggaccatccataagcggttctctttgtcgaacaccaccactttggttgccaattgattcgctatcaaagtacgatttatcttgatttgattgttcttgaatatgttcttcattatcagttgttgcatattcactatccacctctgttttttccattgttgctgtatggaattgtacgaagttctcttcttctaatgctttgatttcttctttcgataacgctcgataccaatctttcgcttttttcgccgcaataggaacaacatctttttcaagatatccttcttttaacattgcattcgcaatttctatcgctttttgccgtttaattacttcaaattctttccatttttcggggtaacctttcattgtaaagggcatttccttaacctccaatatgttataattcatgttatataccaccataattataaaatgaaacatattaaacacaattttttagactcccgtcataataacttcagacaaacgttagtctgacctgataaatattttattttaaacgttcttgtctctctcacgaaaaccattgtgttgaatattcatcattgctgattgaatataattatactgtggcaaatctggtaatatctttatttctaattctgtatttaattctaaatgcttagcgatgttttcaaatgttgctaaatactcgcccattaattgttcatttattgtaagtctatcttcattagccatggctctatttaacataaagctaatttcttctaatgcgaataagctaggataataattttgaatcaatgtcttatcactaaataattcaccattagctgcattataaacttgcgtcatgttatttaatttcacagataggttcatagccgtgtttttctgatacacatcatctttatattggttttcagaaaataaataatggaagagtgttgcttctttacgaacaacttcagccattacattaggaagcaatgcggatgcggtacgttgtccaaggacaaataaacctatgattgcaatcacaatacccattgcaacgtcaataactcttggaaacgcaatgttaattgttaaattctgtgatgctaagccgttcattaaaataacttgtattgtaataaagactactgcaatcgcataatttgctcccaccaatgcttcagtaaataatgctgcaatgcccattaaaattactgcaacaggtgttggtattgaaaataacaatataacagaaagtactaacacacctaaaatagtacctaaacctcgtgccatacctctctcgattgcatgtatagttgatgttcctagtaatattgtatgtgcagataacggtatccagtatgctttttcaaaattaaacattaacgcaataaatatcgctatcatcataatcgctgtatatctcaatgtatttctaaaaacaatagagtctaatgttaaattttgataaatgcgtttactatataaaggttttcgcatgtctgcttcatacgcaatacgcgcttcatttgcatgcaccatttcatcaattttcaatatatggttgaataaattttgaaattcctctgttactgtcacttcttttcgccaatatcttacattttcatcactattatctagttgtgcaatgatatgatccatcatttcaattaactcatctggcaatggtcgaatttgtttagcgttcaactctaacagttcagaataaatcccttgggcagatgtgtgtaataataataatttttggaaacgtctacttaatttatcgttacttgaagtagaagtgattaataatttatcagatgctttaaaactatctaccgctgtttttgctacttgtaaaaaagcagatttatcattataagtgtgtaacaacttagttatgagtttaaaatcattttgaattgcttgttcttcagctttgtttttagaaaatacgatcgtgattaacaccatcatagtggcaagtataccgcctactaaaatcgcaaagcctctatataatgcttcttcgggagctataggtaagttaatgggtagactgaatgtcacaatgaagaatgtcgatgacggtccagctatttttaaggcagtaaatatataaaatggtataaccgtaacaattaataatgtcattccaaaaacgagtggcgttttggctgttagcgtaccaagcatcatacatattgcaaacgctaaattacaaattattacagttcgcagcttagatcgcgacggacctttaaaaacataaatatgggctagtgttccggttgcaactaataatccaaattggaaattaccaaataagtaaccgattattgcaggaataatcattaacagtccctgtcttacacctttataaaagtctaagttaagtcgattgatttttatgagtgatgtcaaaaagatgtcatttcgacttctcctttccttgtcaaaatatttccataatctttttattagcatagttaaaatgaatttgttgctataaattttaattacgcaacatatgtcattataacaccttatgctcaattatctaaatttaaaaacttttaaagtccaattaaaattattttctaatgttatttaacatcgttgaacctttggtcgcccacctttgcgctagttaaaatttatttgtgacatgttgagattattttagtgaattatacatttagggttagaaatacattcacatagacttagtgtctatttacttcatattattcctagggttcaagatccaaactatagtgaatttaagaaagtttataaaacatatttgcctcataaacttgaatagttcctatattcgttatttaaaatgacattcgatgtcagttcatttcttaaaatatcgaaagatgattacgtataatatatatagtgacgtatttacaaataatggcagtaagcagtacaaaatgattacacaaaaatttccttctactcgataaattaagaagtataaaataattaaaaaaatacttataattagacctataaggggcaaacttctaatatatttctctaagttttccttcatatgtataacctcctaaaatttatatgtacttttacaatagttacctgactaaggttttaaaactttatttcttctacatatatcattttaataacttcccattcatcttaaaccatatctgttttaaaatttttcaatttcaacgtaaaaaaagcaataagccccaactatgtgaaagcttactgcttgtttaaattatttttctattgctttatcatcactaacaattaaaggttgatctggtttcacatagaaccacataattacagcaatgactgctggaacgattaataattggaatgtcattgtccaacctaaatgttctacgaatagacctgctaatagcggactgattaatgcacctatattaccccataagttcatccatcctgatactgtaccagagaagttacgtcctaaatcagttgctgcagcccaactcatacccattgaaataccgataccaccaagacctagtgataaccagaaaatacttacatataaatttcctgtacgtacagcaaagataattgaaactgcaaatacaataaatcctgcgattgcaatgacacctctagctacgaattttgaacgacctaatcctaatacacggtcagaaattgcacctgctgataagattaagaagaacattaataaccaaggtaatgaactaatgctcatttctttaaagttaacgtggaatacttctgttaaatatgtcggtaaccaaattaagaataatgtaatgataaattgtacaacaaagtattgaattgcaattgcatagaagctaaaacgcttaaagaaatcattccatggtggtgatgacttttcagtagctacgatatcacgattttccataatgaaacgtttctccgcttcattaaccattctatgttgctcaggtaagtctttggcaataatcgcccataatacagccattaaaatacctactgcaccaaaaatgtaaaatactgcttgccagttaaatgcgttaacaatagcaattgtaactattggtgctaatacaggtccgaaatatgatcctgctaataatgcacttgatgctctacctttttcatttttagagaaccaaaatgagttaaacacagcattagaagggtacattggcgcctcacccacaccaaataagaatctcactaaataaattaaaccgtggttcttaatcatacccgttaagattgtaaatgcactccaccaaactaatgcaattgtaatcatcttacgtggaccgaatttttcagccaacatccccgatggtacttgcattaatgcataacctagagagaagaatgatgccaataaaccaaattgtggttttgtcatccctaaatcatccatcatttgcttagcgatatatgaaatgtttgctctatccatatacgcaataaccccaataaagaagaacgcaagcgcgaacatccaccttacgttagttcgtttttccttcataactattcctacttccctaattaattttttaaaacttaccctgaaacgttaaaattttcggacatctggcatgtccacccctactttgtcacaaaattgtaccaaagttattttttataatattatcagacatggaaagcgtttacaatagaatctataaaaattttattaaattccgcttaacttttgctattaaaacgatataaaggaacttttagttacatagtagcctatcatttgttgattaaaaatactgcaatcctagtgttttaaaacgtatattgcaggctttcttacatattcgacattcattttaaattgcataaaactacattgttcattcattgtgcagcgcctgttatttagatgattatttattgacttttcgtacttatagcaagcaattttttgatttattgcttataatacattttaagacaaatgcttgtttcaacatcacatacgacatcactcattattcatttgaatttatccagtttctatttgtctgcaattgctgaaaattaaaggagcttatttttaataatggaacaaattatcactgaatttattagtcgttttgggtatgcagccatttttatattaattttattagaaaatgttttacctatcgtaccatcggaaattattctgacatttgctggtcttatgtctgttaaatcacatttatcaattataaccttatttattattgcaaccatcgcatcgtttataggattgttaattttatattatatctgtcgtttgatttcagaagaacgtctatatcgctttattgatcgacacggtaagtggattaaattgaaaagtaaggatttaaagcgagcaaatgattggtttaaaaagtatggcgtatgggctgtatttatctgtcgtttcatacctgtattacgtgtattgattaccattccagccggtgtaaaccgcatgaatgttgtgacatttaccgttatttcattaataggtacaacaatttggaatttcggtttaattttactaggacgcacgttgagcgatagctttggtatgttgatgactggtcttcatacatattcacgtattatgtatgttgtcatcattatcgcagtcatttactttgctatacgttacattggcaaacgtaagagagtaaaataatattgttgttagtataaaggcatgaattttaaatttctataaacaaaacatactaagattagctatgaagaaatctatgacgatagattttttcatagctattttttatagttatagagaggagtagactgtgcgttctcttgggtcttaaacccgtataaaaaacaagtcagctttactctcgccttttgaaattcgtttgaagtatgttgggttcttgaaaccgtgtagaggaaaatgaaatgagaaaggttaagtaaagttctcacttctcaattttttaaaggaggctatatttatcaattacttaggtgttgatattagtaaaagaagtagtgtcgtagctcattatcataacgatcaatttcaaagagaatttaccattcaaaataataaaaatggttataaatatttattaaagtatttgaatgatttagaccacctacaaatcatttttgaatctactggtatttattcaagaggtatgactcgattttgtcgcataaatcaaattaattatattgagatgaacccgttagaagctaaattcagaacaagttctttaagatcatggaaaaccgatcaagctgatgcacataaacttgcgcaattagcacctactttaaaagcaatggaaaccttacctatgtatgaatctatcttctttgagttgcgagagcgtgcacgttttcatctagaaattgaaaatgaacaaaatcggcttaaatttgaaattgttgaacagcttcatcaaacttttcctggtttagaaaaattatttagtagtcgatattctatcattgcacttaacatcgcagaacgatttactcatccagatatggtgagaaatatggatattgatactcttatttcttatatattcaatacgactgataaaggtctatctatgaataaagctgaaaatcacgcacaccaattggttaacattgctcgggaaagctatccgaatgtcgatagacattcatttcttgtagaaaaagcacgattgttaattagacatttaaaacaatctatacaacatcttaaacaattagatgaagacatgattcaattggcgcaacaacttgattgttttgaacatattcattcaataccaggcattggaaaactatctgcagctatgattattggggaacttggaaatattacgcgatttaaatctaataaacaattaaatgcatttgtaggcatcgatatcaaacgatatcaatcaggtagtacgcaaagtagagacacaattaataagcgtggcaataaaaaagcaagaagattactgttttgggtggttatgaatataataagagggcagcatcattatgacaatcatgtagtcgattattactataagctaagaaaacagcctcatgagaaagctcacaagactgccgtcatcgcttgtattaatcgtctcttaaaaacgattcattatttagtaatgaatcaaaaattgtacgattatcaaatgtccccacattagccaaccgtacaatcaaatacagtgtaacaccttattcaaaaaaattaaattgaacgggctaatttagtaatgcttattttaaacataaagacttgactaatcgtaggaaaagaggctgggacattaagttcttaggcaatgtaaaaaagctgtatttctattaattatttgatagaaatcagctttttttaaaatgtatttgataatatacagctcgtcgagctgctattttccttatattaagtgccattaatacaaaacctagctctcgtttaactttatttattcctcgaactgacattcgagtgaaacccaaaatagccttcataaatccaaaaacaggctctacatcaatttttctttgactatagatttttttcgtttctggttcagaaagctttttgattaatttgggctttaaagtattcccaattataattcttcatgattttcttattggatttcgaatttggcttcatgcattgttgcctcaaagaacatgctgaacagtcatcgcattcatatagcttgaagtcacgtttaaaaccatatctatcattacggtatgcatatcttttaaaaacctattcttttgttattaggacatataaattcatcattaagttcgtcatatttccaatttttgagtgttaaaaaatgtcacttttaaactttctagttttatctttaataaacatgccatacgtaataagtggcgttttattaaaatcatctataatagccatatagttttgctcactaccataacctgcatcagctacaatatactccaggtaaataaccgaaggtattttgaatcattgttaaaaaatggaattaaagttctagtatctgtcgggttttgaaataggtcataggataaaacaaattgagaatttgtcgctatttgtaaattgtatcctggcttaagttggccatttttcatatggtcttccttcattctcataaaaagttgcatcatgatcagtttttagaaaagctatttctatctttaagaatcgatttttgttcttcatatttactttttctttcggaataatcatcaaatttctttttgaacttcttaatctcagttctttttttacgggtctgttttctaatttgagtacaatcttcgttctcaatagaatgatttaaatcttcgatttctttatctaaatgactaccaattaaatctatttcttctattgttaaatcgctatctccatcttcttttatctctggtattattttttcttcaactaagttcacgatataatgcttttgaattttcgttcaatttcgattcgtgatttttgaatacttttcttccacacaaatgtatatctattggcactagcttctacttttgtaccatcaataaaaattgaattatcatcaataagattttgctttaaacattgactatggaactgaataaataaagattcaattaacgcatcagtattaggattcactctaaaacgattaatagttttataagaaggtgtttgatcttgagctaaccacatcattcgaatactgtcatgaagtaatttctctattctacgaccagaaaatacagattgagtatatgcatataagatgatttttaacatcatttttggatgataggatgttgcgccacgatgatgtctgaattcatcgaatttcgctatcaggtatcgtttcaacaatttcattaacatatcgcgaaatatcatttttgaggaattctaacagaagtttctattgggtagtgtaagttgggtcatgttataatttttatacataaggcacctcgttaatttagtttagtggtatttattaaattatacgaagggaccccaacacagaaaattcattttattgaattttacatttatgtgcaagttgggcaaagtgtcttatttttttaaagtatttcaaagtaaaattacatgttaatacgtagtattaatggcgagactcctgagggagcagtgccagtcgaagacaggggccccaacacagaagctgacatatagtcagcttacaacaatgtgccggttggggtggctgagacggcaccctaggaagggacccatcatcaaaaattctatttatagaattttacagtaatgtgccagatgggcatagcgaagccattcaatacgaagtattgtataaatagagaacagcagtaagatattttctaattgaaaattatcttactgctgttttttagggatttatgtcccagcctgtttaatatagtgcgttgcttttctcatttattaggtgaaaacattctcatatattaagtaaagcgacagtcataattatcaattcctttcataagaattaactgttaactagagtttacaccacctttcaaaatacccccacttgtaatgtacaaaatatgctcacttaaacgataatcgtatctctgccaagctatttcaactctgctttaatataaattattctccaggatgggatgcttatatctctatcatgatatttcaacgtcgcttcaacaactttatcatttcatatttatgcgggtacacttcaacgctactaatatgaatgatacaaccacagattctcaacactaaaattcacaatatgtttactctatttttatcaattcaagcatacttattgaaaaatgttaacgttttcttgataatcattgtaagcgtattaattttacaaaccaatgattgaaatatactacaggagtgacacacaatgactcaaattactgaaagagaattaaaaaagaaatatttggatttattatctcaacatttcgatactccagaaaagcttgcgactgaaattattaatttagaatctattttagaattacctaaaggtacggagcatttcgtcagcgatttacatggtgaatatgaagctttccaacacgtattacgcaacggttctgggaacgtgcgagcgaaaatcaatgatattttcaaagacaagttatcaacgaaagaacttaacgatttgactgcccttgtttactatccagaagacaaattgcaacttattaaatgcgattttcaaaattatggacaattaaatgtttggtatattacgacgattgaacatctcattcagctaattaaatattgttcttcaaaatatacgcgttcaaaacttcgacgtgccttgccggagcaatacgttttcatcgtagaagagttattatataagaacaacgaattcaaaaataaaaaatcttactacgaaacacttgtaaatcaagtgattgagcttaagcaagcggatgatttaattatagggcttgcgtattctgtacaacgcttagtcgtcgatcatttacacgttgtcggtgatatttatgatcgtggcccgcaaccagataaaatcatggacacgctgattaattatcattctctggatattcaatggggtaatcatgatgtgctatgggttggtgcttatgcagggtctaaagtatgtttagctaatttactacgtatttgtgcacgttatgacaatctagatatcgttgaagatgcatacggtattaatttaagacctttgctaacattagccgaaaagtactatgatgcagataatcctgcttttaaacctaaaaaaagacctgacaaacatgaacgtttgacacaacgcgaagaaagtcagattactaaaattcatcaagctattgcgatgattcaattcaaactggaaataccggttattaagcgacgtccaaactttgaaatggacgaacgacttgtacttgaaaaagttaattatgatactaatgaaataacagtatacggaaaaacatatccattaaaagatacatgcttccaaactgttaaccgtgataacccagcagaattactacctgaagaagaagaagtcatgaacaaactattattgtcattccagcaatctgaaaaattacgtcgtcatatgtctttcttgatgcgtaaaggctcactttacttaccttgtaatggcaatttactcattcatggttgtattccagttgatgaaaatggtgagatggaatcattcgaaattgatggtcagacatacagtggccaagagttattagatgtgtttgaatatcatgtccgtaaatcatttgatgaaaaagaaaatactgatgacttatccactgatttagtttggtatttatggactgggaaatattcttcactatttggtaaacgtgcgatgactacgtttgaacgatactttattgcagataaagcttctcataaagaagaaaagaatccgtactatcatcttcgtgaagatgtgaatatggttcgtaaaatgctcagcgatttcggattaaatccagatgaaggacgcattattaatggtcacacaccagtgaaggaaattaatggggaagatcctatcaaggctgatggaaagatgcttgtcattgatggcggcttttcaaaagcttatcagtcaacaactggcattgcaggctatacattgttgtataattcattcggaatgcaactcgttgcacatcaacaatttaacgcaaaagaaaaaattctttccgaaggtatcgacgaactgtcaattaaacgtattgttgataaagaattacaacgtaaaaaaatccgcaatacaaataaaggtaaagagcttcaagctcaaatagatattttgaaaatgttaatgcatgatcgttacttagactaaagacgacatttggtgcatttatcgtgcacttatttagtggtgctgtgtttacgcattggctacgcaaatgcgatggtaaataggcgatctagctacaccgaaaaaatcccctcactattgcgagtagtgaggggattggcgtatctatgctagttcctgttaactgtattataacaactttacagtaaaaaaatgcaaaattaactaataaattaataaaatgaccgacgtccttgcttctactccaatttaacaaaatactatattagtactatatttttcattaacatgtatgttacattttctatattacttaaaattacgaagggacatttttaaatcatgcgtatcttaaaagagtccattattgtggcatttgcctttgtgggtgttgtcgttggtgccggctttgctactggtcaagaaattttccagtttttcacaagtcatggcgcatatagcatttcaggcattattgtgacaggactattgattactttaggtggaatgattgtcatgcatacaggtcatcatctaaagtctaaaaatcattctgattcaattaactatttcttatacccctctattgcaagaggttttgatattattttgacaatgtttatgttgtctctagctattattatgactgcaggtggcgcttcaaccattcatcaaagtttcaacttaccgtattggctgagcgcactcatattagttgcctttattttagcaacactgtttctaaaattcgatcgtttaattgctgtgcttggcggtgttaccccatttttaattgcgattgtcattatgattgcggtgtactatttcacaacgagtcatcttgattttactgccgctaataatgatgctcagattcataagcagaaatcattatcacctggatggtggtttgatgcgattaactatgcaagcttgcaaattgctgctgccttcagcttcttatcggtgatgggtagtaaagttaagtatcgtgactcaacgttatacgggggcttgattggcggtttaatcattacatttttactcatgatgattaacctaggtttaatttctcaattcgataaaattaaacacgtcgatttacctacattaaaattagcgacacaaatgtctccgtcaatcggtattattatgtctgtcattatgatacttgtcatctacaatactgttgttggattaatgtatgcatttgcgtcacgtttcagcgttccatttagcagacgttacttcatcattattattacaatggctgtcatcacttatattagtacatttatcggtttcatttcattaattggaaaagtattccctattatgggattgttcggtttcatcttactcatacctgtactctataaaggtttaattaagcgtattaccggcaaatctcatatcgattaaaatatctatactattgtaaaatttagtacaacacttcaaaatcaaaaaagcgggcagatgaaaagtaaaaatcttttccatctgtccgcttcttaatagaactgttatttcccaagtatttgttgaccagccgttaatccagtttctgtaatttcatgaccattcacccaaacttcttcgacttgtgccccacgtgtcttaaacaagttaataacttgttcacttgcagctaatggcacaattggatcatgtttccccatggaaagcaacacactgacatctgataaattctttgttgaccttacctcaatcggatataacggtgcatataacaatgcttttttaaatggtgcctctgaacgcaacattaagttaatcgctatatttgatccatttgaaaatccaacaagcacagccttttcaatatcaaaatcataacgttcagcagcttctttaatgaacgttaacaattcttgtccccgaaatgccaaatcttcttcatcataaacaccttcaccaagacgtttgaaataacggttcatcccattttctgaaacttgtcctctaatacttaacaagtgataattttcattcaatgcttcgcctaatggtaataaatcgaactcatcaccacctgtaccatgcaataatattagcgtcggcgcaccattttctccttctctaaaaatatgttccatcacaaatccctctcattccaattaatcatgttgacgcttcgtattaaaaggtctaacttccgattctatatattctcttttgttttctaaaaatggtggtaaggataacccttcgcctaatgtttcataaggttcatcttccataaatcctggtccatctgttgaaatttctattaaaatatgccccacacgtgcatataatgcttcaaaatagaaacgattaacgatgcctgagttgttaatacctacctctttatatttcgttgcccatgcttctattgcattatgatctttcacacgaaatgacacatgatgtacctcaccataaccttgacgtgctgctggccctttatcatcttttattaagattacctggccaccattgcctccttcgccaacttcaagtaatgcgacattatcttcatgcgcaatagttgtcataccgtaaacagtctctaaaatatttttaaagtcgtcaaaataacttactttaatttcaatgggtcctaatccataaatcgctttatctactggaaccggtccattcttccaaggtacaccaggtgctaccccttcatttaactcatctgaaattaattgatacacttggccatcgacttcttcaaatggcaacacttttttaccaaataattcttgaataccttcgtgtttaacaccaaactcatcaaagcgctgttcataatacattaatgcatcgtcgttaggcactctaaaagacggtcttgtaatagaatttgtacctgcctgcccttttgtaatatttggaaaatcaaagaatgtcatgtctgtacctgccgaacctacgtcatctgcaaaaaatgtatgatacgtataaatatcatcttgattgactgtctttttaactaagcgcatgcctaatacttctgtgaaaaatttataattacgttctgcatcatctgtcattgctgtgacatggtgaatacctagtaattcatgattatttgtcattttatataccctctttatatttttagtgtatttatctcgaaatcgagatatttcaatgtaaaattttaatgcacgccttacacttctgtagattgtgcacttagtttcttaaacgcttgttgtaagattgttaattcatcctttgttaacacatcaaacgcttttgttaatgtctcagcatgcttagggaaaatatctgccatttggctttgacctttttcagttaaacaagccatatatacacgtttatcatctttatccttttcacgtgtaatccaacctttgtcctctaattggcttacaacatatgaaatgctgctacttgcaattaatacgcggtctctaatacgttgaattggttgcggacctttattataaagcaactcgagcactgcaaattcagtaatatttaagccatatcgctttacgtcttcttttgtaatttgctctaatgtgtctaacgccctattcattccgacaaagacattgagcgattgtttcgttcgatccatatcatcaccaactttttaatttatttcgatttcgagataaattatatagctgaatggatttaatgtcaagatacgtgttttcatctttatttcaaattgcgcttaataaaaacgactacatagatgtggcaatgtcgtcacatgactgtcatgcacctttgacttcgtttaagttaaaatagaatagggaaatactataatcaatcatgataggagttgatatgtatgagtaaccttgaaattaaacaaggcgagaacaaattctatattggtgatgatgaaaatcatgctttagctgaaatcacataccgttttgtggataataatgaaattaacattgatcatacaggcgtatctgatgaactcggtggtcaaggtgttggcaaaaaactagttaaagcagttgttgaacatgctcgcgaaaatcatttaaaaattattgcctcatgttcatttgccaaacatatgttagaaaaagaagattcatatcaagatgtgtatcttggttaaacaaatctcgcgatggtgcgccagtgccatcgtttttttatttgttcgtatcaatataaaattgcgaaacatcatgttattttgcatttcaaactttttgctgtcaattcattttcttttctggtatactttttatactaacttatagaaaaatagaaaacgaggcgatgcataatggcatttcacgataaaacagcaacacaagtgacaaacattgaactgaacgtaagagacttagacttaatgacaacattttacaaaaacattttaggactatccgttaaaagttctgacgataacacaaccgtattatctgttgggactggtggccatactctaacgttacatttattagaagacggccgtcagacttccccacgtgaagcagggctttttcatatagcatttttattaccaactactgaggatctagctaacttcttatatttcgtggcacaaaaaaatatgggcatcggcgctggtgatcatttagtaagtgaagctttatatttcaacgaccccgaaggtaatggtattgaagtctatcgcgatagaccttcatcttcatgggaatggcaaaatggcaaagttaaaatggatactttagaagttgatagccaaaccttattaacacatcgtactgatgaaggttggcaaggaatgccagcaaaaggcatgattggacacttacatttaaaaacacatgatttagacgcagcatatcaatgttacattgaacaattaggattccaacatgtgtctgattttccacgtgcgctatttatgtcaacgaatcattatcaccatcatattgctgctaatacttggcaatccaatcaagcaagacaaaacaatgcacaaagttatggattaacacatgttgatatttatcaacccgacgcctcaacacatacatttacggcaccagaaggttttgacatcacagttcattcaaatactgaccttgttccagaaaaataatcatccatactttattaatacaattttttcacgcaaaagcctgcgattcatttatgtaatcgcaggcttttttattgctaactttttattttatatatttagacatactgtattctatttattcttttggtccaacccattcaataacatcttcatatgcttggcgtgttttatttttcggtggatcttgttgtctgtagccaaatgcgaccatcactgataaaccaaattgctcagtatctaagatgcctttatttgctaaaatgtctgtcactgtatccagactaaaaccttccatcggacatgaatcaatacctaacaatgcggctgtcgtcatcatattgcctaatgcgatatacgtttgtttacttgaccagtcatacaaggcttgatcattatcagaaatatggaaatctgcttggaatgcatcgaatttttgttcaacagctggaatcgtttgtgcctcatattttttaatatctcttaacatatgttgtacatacggtgatcttgacgttacatttttacgcgcaaaaattagcacaaaatggctcgctgtatctaattgtttcgctgcaccccaactgtgcgcttttaattcatcacgtaacgcttgatcttgaatcacgacaaacttccaaggttctaacccaagagaacttggagacaatctacctgactctaatattgtttcaaaatcttctttcgaaactttcttttgtggatcgaattgcttagtcgcatgtctgaaatgaaatgcatccataatcgtttgattcatattgctcattgaacatagcctccaatttttatatttattgctatacaaattatacttcatgttttaaaaagactaaagtaatccgtttgcaattcactataacttgtgcacatgttataagttttctgcaataaaacacacttttgaattttggaaaatttagtgttataatatatttgtgatatttttcacaattaaattgtggcgtgattttaatgtacataatctttaatttcactcatttacttttcaatcttttaaaagcgaggtttttaataatgacaaaaattatgttctttggtacgcgtgattatgagaaagagatggcattaaattgggggaaaaagaataatgtcgaagtaactacttctaaagagctattatcaagtgctacagtcgatcaattaaaagattacgatggcgtaactacaatgcaatttggtaagttagaaaatgacgtttatcctaaattagaatcttacggtattaaacaaattgcacaacgtactgctggatttgatatgtatgatttagatttagctaaaaaacacaacattgtgatatctaacgttcctagttattcacctgaaacaattgcagagtattctgtttctatcgccctacaattagtgcgtcgcttcccagatattgaacgccgtgtacaagcacatgattttacttggcaagcagaaatcatgtctaaaccagttaaaaatatgactgttgcaattatcggtacgggtcgtatcggtgctgctacagctaaaatatatgcaggatttggtgctacaattacagcttatgacgcttatcctaataaagatttagactttttaacttataaagatagtgttaaagaagctattaaagatgccgatattatttctttacatgttccagcgaacaaagaaagctatcatttattcgataaagcaatgtttgatcatgtgaaaaaaggtgcaatcttagttaacgcagcacgtggtgcagtcatcaatacacctgatttaatcgctgcagtgaacgatggtactttgttaggtgctgcgattgatacttatgaaaatgaagcagcatacttcacaaatgactggactaataaagacattgacgataaaacattattagagttaatcgaacatgaaagaattttagtaacaccacatattgctttcttctctgatgaagcagtacaaaaccttgttgaaggtggtttaaacgcagcattatctgtcattaacactggtacatgtgaaacacgtttaaattaatatatatttaaaagcaaaggcgcgccatgtgcctttgctttttattttgtatatctgtatcaaaatcgatttgattaaaatccgctttattttatcatctatatcaaatgactgtagtgcgcttattttactatggcattattgcctaatctgtttgagatatattaatatttgatgattcgtattcaaagttttcatttaacatgtatttagtatcatgatagctgcttcattgatgatatactacctactttttcaacacttcttgttcgataatcgttaaaacaccctgcttatcattgcttggagcgacagcagaggcaatattgaacaattcttcatcatgactattttccatcacataactatgcttagcgaacgcaagcatatctttatcattattcgcatctccgaaggccatgagctctgaaggagacatttcccatttatctaacaatcgttttaatgcctgccctttagtcatgtttggcataataatatcaatactatcgtgcccacttgagacaagtttaatatcattgctgaattgcgttgctacttcttcgtcaacattcggatgcgtctcacgattaatattaaatgctattttgacataatcatcctcaggtaattgttgtagactgtcaatttcttttaactgatgataataaaatctcgtatcttctttaaacgcttcagaagtatgttttaaaatatacgcgcttttcaaaccacagatgacgagttgatcaataccttggttcatatttaaataatcaacaacctgttgaaacacctgacgattaaagcttttataattatataacacatttcctttataaataactgcaccattttcagaaataaaatacatatctctatccccgaaaatagacttcaacttcgcatattgattaccactcgcagcaataaatgtaatatctctatttctaagttcagtaaaaatcgcttcaaatcttgatttatcgtatgtctttttcgaatctaaaaacgtcccgtccatatctaccgcaatagccttaaccatgattatcctcctcattgctcttttagtcgtcttcattatatccatctcatgacaagcaatgaagtttgtcataccacaatgaacctatattcacattttgaaattgctttcatatatgcaaaacacattacaccggatatagcattcagaggcgagcataaatttcagaatattgtaaaaatataatgaagcatttatcatttggacaaaatatagtgtgatatactaatttataacatctatacataatgtgaaagaatttttaaaaatacaattaaatatcggtgtaataaatccctttatacataggagttgtatacatgaaactaaataactattctttaaaagttaaaaacaaacaactagttgacaattgtgatttaaatttctatcttggtcagatcaatcacattgttggtaaaaatggtgtaggaaaatctttgttagctaaagatttcttactaaataatagtggaaatatccctaagtccatttctcaaaatgtaaccttaatatcaagttcatcaaatattcctaatgatataacaaaagattttttattatcattgttaaaatcaaaatttgaaaacaatcgacaaacattcgataagatttataacatactaaacatcgaagcaataccgtctaacgtactactaaaaaacttgagtgatggtcaaaaacaaaagcttaaattattaagtttcttattggaagatcatgatttaatcatattagatgaaattacaaacgctttagacaagaaaacagttaatgaaatttatgaatttttaaatgattttattcaaagccatcaaactaaaactattatcaatattacacataatttatccgatttaagtgctttgccgggtaaatactttatttttaaagaccttcaaatagaagagtaccaatcaaaagaagaagtcataaatgattacattaatttataattgaggtgtccactttgaaattagaatttaaaaaaagtatttccaataaaattatttacacgcttggtgtgctgttcatattccttttcttacttgggtattttttaccaataggaatagacaaagttaaaagtttaagctatagccagtttttcttcagttcatatactgttgcaacgcaattagggttcttactattttcatttgtttttgcatattttattaataaagagtattcgaataaaaatatcctgttttataaattgattggcgataatatatttaccttcttctataaaaaggtggcagtgttattttttgaatgtttagtgttcataattctaagtatcacaattatttcaattatatattcgaatttctcacattacttactattaataatcttattttcactcgttatcttacaatatatcttagttgttggaacgattagtatggtttcacctaacattttaatcagcttaggtatcagcattgtatattggattggttcagtcatcttagttgccattaataaaaatatatttggtatcgttgctccatttgaggcgagcaacacgatgtatcgtgccgtagaaaaaatattgaataacgagtcaacatttatgtgtcctactgaaattataaatacagtatcattcttcgttcttctacttatagttaatactattgtcttattgctaagtagaaagagatggttgaaaatcggtatgtagtacataaaaaggagcggcatccattgtcgcttctttttattatgtatttttacaatctccaccaatgacacgtcgtcattggtgcctcagaccaaacaaaaaacagtctcgcaatcaagactgttttccactcaatatattcatccattagcgtaatggattatttaacttcagtagctacaaagattttacgtgtttcccaaacgcctgtcttttcattgtaatcatcacaagtaattaatgttaattgtttatctttacctttttgttcatctagaacttctacatctgtaggcttaacatctcttatacttgtcattttatacttacgtgtttcattaccaactttaaagtacaccatactaccttttttggctgctttaagatttgtaaattgatagttcggacggtcaatgaaagtgtgtcctgcaattgaaatattttgatcatctagtgattcattttcttctgcaaagcttacacctctatttaattgttcaggtgttgctggtcctggatatactggttctttaatatcagcatctggaatttcaatatagcctgccactttcgatttatctttcggaatttgaggtttagcttgctgctttttatccttactcgcctgttcttttacattttcatcatattgttcaatcttttcatctttatctttatcgtgaagataattatcgatatgtggtttagcaaacaaatatgctgccactaggataagtaccacaccagcgattgtcattaatcgatttgtccattttttcatacgttaaggctccttttatacatttcacaatgcctattaacatttcatatagtataccattaatttcaaaatgactcatagcaattcattttatactataaaatttacatgtatacttttacgttagatttcattacacatatttgcattcaaataacgaaacgcttttaataattactaagggggaattgttatgattagatgcgctaaaaaagaggatttaaacgctatattagcgatatacaatgatgccattatcaatactacagctgtttatacttatgaaccacaaaccatagacgaacgtgtcgcatggtttgaaacgaaacaacgtaagcatgagcctgtctttgtatttgaggaaaatggaagtgtcttagggtttgcgacgttcggttcgtttagaccttggccagcatacctatatacaatcgaacattctatttatgtcgatgcttcagctagaggaaaaggtattgctagtcaattactacaccatttaattgttgaagcaaaagctaaaggttatcgtgcgctagttgcaggcattgatgcttccaataaagcgagtattcagttgcatcaaaagtttgcttttaagcatgccggcacactgaccaatgtaggttttaaatttaatagatggttagatttagcattttacgaattagatttacaagactagtaatgtttgaatcacataatataaacaagacaaccatgtcaattcacttaacataacaagccaacatataaaattttaaacttctcagggacaatttacatcgtcccttttattttttcttttcaaattctatccccatagctttgatttaacgctttttctcaataacaaaacgaatatagtagaacatgaaaacgataatcatgctgagcgataaagatttaaataatagattgacccacgttccctcagtcgtatatccatatgtaatcgttgtgttaatgatgaatgctataaagatgattgatagtcttagcatatcatcactccttttaagttattttagatatacgggggcgcttttgcaatcactattttgattagcatgcatttcccataaatttttcaactttatgaaagataattaagaagcatctatctggtacgaatgatccagacagatgcttcttttttatcaatatcttattattatctcattaattatttttaaccatatcttcagctgtgccaaagattttacgtttaattgcttcgccagttggtgtgcctgctagtccacccaatccagtttcacgtaatgatgcaggaaggttacgaccaaccttatccattgcttcaataacttcatcaacagggattctactttcaatacctgctaatgctaaatctgctgaaattaaagcgttacctgaaccaattgcatttctcataacacaaggaatttcaacaagtccggctactgggtcacaaactaaacctaataaattacttatcgctaatgccatagcgtgcccggatgcttctggtgatcctccgaatatagctactgctgcagctgccgccattgcagatgctgaaccaacttcagcttggcagccacctgttgcaccagctacacttgcattgtttgctacgacacgcccaaacaatgctgaagtgaataagaagtcaatcatttgctcttctgttaaatcatgtgttttttctaatttaaaaagtgcaccgggaatggtacccgaggaaccagctgttggcgttgcacaaataatacccatcgcagcattgacttcatttgttgcaatggcacctttgactgcatcaatcatttcatatccagacaaagcatgatgtgtttcattataatcacgtagtttagcagcgtcatgaccagtgtagcccgttacactttcaacgccatcacctgttgtccctttgattactgcgtctcgcatgacatctaaattttgtttcatttgcgctcgcacttcatcacgtgatttaccgcttaattccatttcttctttaaccatgatatccgcaaatgacatattattttctacggcataatctatagtctctctaattgaatcaaacatgtttattccccctctaatttatataggaaacgtttacgtcactgtatttctctttaattgtatttaatgtcgattctgagattgctttatttaatggtattacaaccaagcatttatcttcatctatcttaataaattcatctttacagtctaatttcatatcgttgatatcattaatgaaatgatttacttgtgctttactcatatttccgtcaacaactaaaattggtaatccatgatttaaatctacttctagtccatttatatgaatacctttaattttaattgtaccaccaccgattgaaataccgataatttcaatgtagcgaccatcattacgagatgatttaatataagcacagtttggatgttgaccaatactatcgccttcttcttcgatgatatctattttaataccatcatcagctgcaatttctaatgaagatttaattcggttatcaaatgttgaatatcccattgctccacccacaatagcgacatctgtaccatgtccttggtgtgtttgagcaaatgattcataataatgtatttcaatatttttaggaatatctcccaatattgcgcgtgctgaattcccaatctttactgcaccagccgtatgagaacttgaaggtcccatcataactggtccgataatatcgaaagcactttgataatcatagctctttgccataattaaacactctccttaatatgattctttttgctcggcattttaaagttgatattcattaaattaaacttattaattagtgttccaataatataggctaagacaatgctgacaataatcactgttgcgattgttacaattgatgtcactgcattattaaagccaaacaatacgatggcacctgcaattggtgttgccatacctttgacacctattactagtccgctaaatgtcacgatacatgcgttgacgaccccaatcagtgcatttgtaccatatagttgtactggatattgcgctattagatcaatttgcgtcaatggctcaatacaaactgcaaatgcttttgacggtccaccaatgtttaattttcggaataaaataaggttaacaaatgagctacctgtacatgttagtgctccaatagccataggaacacctgtcagtcctaataaacttgttaataccattgaacttagcggtgtcatacctgtaacaggaatcactagtcctaaaatgaccgctaatgcatatggattgttatcacctaccgcagtgacagcactacctatttgttttaatgttgctagcacaccaggtgtaatgattgatgcaagtccgaaagcaattgctggtgcaattaagatcaccacaattaagtccaagccttctggaactttcttttcaatccatttaattaaaaaagctacgccataagctgcaatgaatgctggtaataatttaaagtcatgtaatactaaaccaacaataaccgcaaatactggtgcaacgcctaagtttaagcacgttagaatacctactgcgataccgcttaaacttcctgctaaatccccaatatcttgtagaaatttaatatcaaatacgccaccaatggcgtaacttaagaatgcttgtggtagaaatgtcgcacaagctgcaccggataatgcttgtagtccttgtttaccgtacggtgcatactttaaaaatagcgtcatgatcactaaaaccaagactaatgtgcctacacctaacagaatatccatttcccaaaaacctctctctatgtttattttattttcagaccataaacatcgtacacccttaagaaaacgttttcaacttttatctgttatcaaatcaaatatttaagtgaaatatttcatatttgtgaaagatttttaaaatggattgtttcaaaaactacttatgttgtcattaatatttactaattaactttttactctatatttcaaacagttgtgtgacagttttttgataacttttttacatctgaaagtaagtaatatttctaaagatttttaatatttatacattttatctttcgagctatttatttttgtttttgtgctgtatttataaaaccgcacactatattcaaaaataacttattacacatatatttgcaataagataattaaagtaggatattatttttagttttctgataggaatgatgatagtctataggttgaatctttactttttttaaagctaaatttacatcaacttaacaatggctggttatactgaagatgaaaatatttagtataacttagtggaggcggtaaagatgcaattgagtcattccgttaaagttgcaatttctatctatttagcacttatctttataacgttcacttcttatttagtcattattttatatacgagtatgactggacatgatgtatcacatttcgtgttagatagtcagcattctcatcatggatctcttacgcaaaaacatttgagtcttcctgaaatctcatttaaatagtttatcctctgtgtttcaacattcatttcccatatcgattcatttatctatcatctagaccactacatcttagatgatttttttattttctcatttcactctttcttaaaagtcgatataatgaattaaatcattatcatacactgacatattttatgttgttggtgttaagttttataggggtgagatacttggcgaataatcattcagctttgcgtttaaaaggaattatacttgccattgtcggtgcttgtttatggggattaggtggtactgtttctgatttcttgttcaaatataagaatattaatgtcgattggtacgtcactgctcgacttgtagtcagtggtgttttcttacttattatgtacaaaatgatacaacccaaacgttctatatttagcgtattccaagatcgacgtatgttaggcaaattacttaccttcagtatactgggcatgttagttgtacaatatgcttatatggcatctattaatacaggtaatgctgcgattgcaacattactacaatacattgcgccagtttatattattatttggtttgtcataagaggcgttgcaaaactaacattatttgatgtgcttgctattatcatgacactattaggaacatttttattattaacgaatggttcattttctaatttagtcgtcaatcctgcaagtttattctggggtattttagctggtgtagcactcgctttttacacaatttatccttcagacctacttaaccgcttcggttcgattctaattgtcgggtgggcaatgcttatttctggtgttgcgatgaatttacgccatccaatttggcacattgatatcactaaatgggacatatcaattatattatttttaatctttggtattatcggtggtaccgcactcgcattttatttctttatcgacagtttacaatacatatcagcgaaagaaacaacattattcggaactgttgaacctgtcgtagccgttatcgcaagcagtctatggttacatgtggcattcaaaccatttcaaatcgtaggcatcatacttattatgattttaattttattactatcacttaaaagacaacctgaagcattagatgaataagaaaactctgataatcactttagcaagtaactatttttaacaacgtagctaccttataggtgatatcagagttttttattttagttaataatatttttcacttggtataaaaagcgtcggcgctctggtatcggaaatactggataaatatggaattggtaatatccaggtataaagtcatgttcgatacctttcgcactcaacaattgcgataagttcaaagcatctgggtacagtacttcttttgtaccaacagttaatgtaatacgacctaaaccatctaagtcaccattaattggtgatactttgtagttatctaaaggtgtgtcccctgcccattgttcagctaagaacacactgccatccacacctaccattgggtctttctttaagtagtcaggaatttcaggatgctgcatcgttgcatctaaaactggtgaaattaatacaatatgtcctggttgcacaatatgtttttcttttaacaattgagcaaatgataaagcaatttgaccgcccgcagagtcacccattacaacgatttgtttagaatctgctacttgattcaataaatcatggtacaacttttcaaaaagcacatacgtcgcttgataatcttgatgcggaatcttcggatatactggcatgatgactttagcattgagtgtttctgcaagttcatcaataaattcgaaatgaattttgagtgggtcttggaaccatgcgcctccatgtgcgtataatacaacgcgttgatgcttatcttgtttatcattaacggtataaacggttgaaccgaagtgcttatccactgttactggcatcttaaactgataattggtgccctcatattcacctgctgtctgtggcgccattttttctaatgctttcatcgcttcttctttatacataaaacgacgcttagctctagataatcgtataccttgttctaacatataacttttcacactgcgtttttctttaattctaatatgtgcgtatgccgctactaaaaatccaaacgcaagtgtagaccattttttacgcatttgtcgtcactcctctttgatgatttctactatagctctactgtaccatgctgattcttattactaccaatatttactgggaaataagttatgatgtctacataatcttagcaatgctaatcatttgcgatattaatgctcatcgacatcgttattcacactatcattcatttgcttaagatgatgttcaaaacgttgcatatcgataaaacgcccttgacgatgcatttcttttccattcataaagattaaatccacaggtacagtgaaaatatttaattctccagcaatagcttccacctgactttgattaatcacagctaatggcacattgggatatgattgcatcaagtcttcaatttgtggtaaaacggcatgacacacgctacactgatcacgcatgacatgtacaactgctaacggatattgatgaataaattcacggaatgcttcgacactatttaattgcttaaccatttcgaacaccttcttactttttatattttaaaatgaggtcattattttgttgctaaaatgtcttgaaatacttgtggcacagaggtaatcttcttatcgctcaatctgtaaaaaccgcctgtctgtgtaccaatacaatgcacgccatgtgcggacacaatttcaaactgaaacacccatttcatcttgcttgctttaactaagtaaatacggcctactggtttgtcatgtattgtgacaggtactttatattctgcttccgttttcataagtataggtgaaatgccttgattgatcattgttgagtaattcatgtgctgattaataaacgctgttctcaaatcttcgaaccatctaatataaacgatattactaacgacacccatcgcatcaatgtcgtaaccattcacttcgatttctttctctgcaactaatagaccttctgttgtcataatgacaaatctccttatcttacaaatagatttaaaatcatgttaatttatttttattactttcatgataaaaatacaagcaattgaactttattacggaaaatcaaacttttcaatgacgctattaattttgctagtcgcgaagatgcatttttctaaaatgcgaaaaaaacataagcaatgttttctaaatctaacactaatatttaccttattctcatcaacacacctgctatacatcattgcgcactaaaaaggcagtagcttcattttaagctactgccttttgtaacgtattctctttcaactcgctacttcgcatatgcactacgaatgactaaaagttcattcatttgatatgctatttcatttttaatcattatttgacgctcataattagcttacctggatcagcatcttgtacatcttcaatgacaagttctttattttcaagatttgtaataatcattggtgtaacgatgcttggtgcgtgcgctttcaagtatactaaattcactttcattaatggttgaccttgtgttactttttcatcaacgttaatcagactttcgaatccttcaccattcagtttcactgtatcgataccaatatgaataagtacttcgacaccactttcagattctaatcctatcgcatgtttcgtagggaagattgttttcactgtaccatcaaacggtgctacaatttcacctttttcagggataaagccaacaccatcacccatcattttaccagcgaatacttgatcaggtacttctgataatggaatgatttgaccgacacctggtgcatagatgtctgttgttccaagtgcttctacgtgaactggttcatctgacatttcttcagtcactgtcgtttcacttggtttcgtaatttcaccactcataatcttggccatatcatgtttaatttgatctgattttggaccaaagatagcttgcatattgtttccaacttctaatacacctgatgcgcctaaagctttaatacctgctacatctacttttgatttatcaaccacttctacgcgcagacgtgtaatacatgcatctaaatgtttaatgttttcttttccacccattgcatctaagacatcaaatggtaattttgcgacactagagttacgaatttcagtttcttcatcttctcgacctggtgttttcaatttaaacttacgaattgcaaagtcgaataagaagtaatacacgatagcgtatacaataccgactggaataactaataatgcgtgtgaacgatcccagtttaataaaccatataaaatataatctatgaaaccacctgagaatgtcataccaattttaacgcctaataaatgcattactaagaatgatgtaccagctaataatacgtgaattccataaagtactggtgctacaaataagaatgaaaattctaatggctcagtgataccagttaaaaatgcagttaatcctgctgataacattaaaccacccacgacttttttacgttctggtcgtgcatttttataaatagcaaatgctgccgctggtaaaccaaacatcataaatggatatttaccagtagtaaatgcaccagcagtaaatggtacgccatctttcaattgtgccatccaaatacgttggtcaccacgaactaattcacctgcgtgatttgtataacttccgaattcaaaccagaacggtgaatagaaaatatgatgtaaaccaaatggaattaatgagcgttcaataataccgaatataaacgttgttaatgttaaatttttatttaataagaaattcgataaactatttaatccgtcttgaattggtggccacgcaaagcttaaaaccacacctgttgcaatcgctacgaccgatgtcacaatcggtacaaatcgtttacctgcaaagaatcctaaaaatggtggtagtgtaatgttataaaatttgttgtagcaccatgctgctaaagcacccatgataataccaccaaacacacccgtttgtaatgttggaatacctaatactaaggcatgtgccggttctttcgctgcttgacttaattcttttgcccctttggcatatgagaaaatgtcatcaattgtaatgtgcaacactttccccattgttgcattcataattaagtaacctactagcgctgctaatgctgcaacaccgtctcctcctgctaatccaagtgctgtaccaactgcaaataataatggcaagttatcaaatacaacttgtcctgctgcttccatgaccgacgaaatcattacaatgatatcgttttttaaccatggtgcaatttctactaattgttcgttgtgcattgcgttaccaaacgctaataaaataccagctgctggtaaaatcgcaacaggtaacattaatgctttaccgatacgttgcaattgtccaaacaatttcttaaacatataaacatcccctatctcaatttccgcttccatgtacaaaaaagcaggcatgaacaaacaagactattctcatagtacggttgtttgctcatgcctgcattaccagtaacacgcaagtgatatgtaattcatagctattatacatatttgtaaaagcgttttcaacaactttttcacaattttatcattaatgcagtacaatcatttgtgataaataaacaaaacggcaatttccattttgttgaaatagaaattaccgtttttatagtttaattcaattgtaattgtgataacctttcaatcagttataagaaacgttttgctgcaactgaaataggtggaatttgatctaaatctaaatatttatcttcagtaatagatctaaatgcccatttaccataaccaagcgcttcttcatttacaattttacctggtaatggcgctgcattaggatcaacataaacatctacaattgttggtacatcttgtgctagtgcctcttctacaatagcatctacttcgctagcacttttaattgtataacctttaccacctgctgcttcagcaaatttggcatgatccatatcagagaaatcaaccgcatattctaattcaccagcagcttgttgttcatatttaataaacgctaattgcttattatttagaacaaacactgttaaaggtaaatcatattgtacagctgttgcaaagtcctgcatcaccatttggaatgcaccgtcaccagcaatagcgatggcttgtctatttggatatgcaatttttgatgccattgcacctggaagaccgcaacccattgtacctaaccaacttgaaatgatgaacttgttatttacaccaaggtttaagtatcgagttgaccaaactgttgctgtacctacatctgctgaaattactgcatcatctttaataaatttattgattgatgccattaatcgttctggacgtaatggtttactattattatttttatcttgttccatccatttatcccaaaccgctttacgttctaacgttttgtttaagaatggtctttcagcaacatgtttaatattttcagttaactgatgcaacgcaattttactatctccaacaattcccacattaatattgaaacgatgtccgatatttttaggatttgtgtcaatttgaatggctttaatatttttcttaggtaagtaatccacatatggatagtttgtaccaaccataattaataaatccgcttcctgcattgtttgataagatgttttggtaccgattttacctaagttaccgatactatatggatgatcatccggtaagattgttttagctggtaatgaatgaatgacaggaattttagccatttcaataaattcacgtagctcatctttcgcatgtttcgcacctacaccaattaacatgacaggctttttacttttattaattagtttaaccgcttttttgatgtctttatattttggtgatactactgttggtcttgatgtatctactggtttattcgttatatctttaattttttcagttaataagtcgttaggacaaataacaacagcgacacctttttgttcatatgccgtacgaattgcttcgttaacgatttcaaacacattgtcacctttttcaatttggtgattataaacggctacatcttcacataatttttgtaaatttgtttcttgaaatgctttcgttccaagtgctgtactattcgtttgtccagataatattaattgcggtacattatccattttggcatcgtacataccatttaataaatgaattaaaccagggccaccgatacttaatgccacaccgattttaccagttaattttgtgtaaccagcagccgctaagcttgctacttcttcatgacgtacatgataaaatttaaattgatctctcactgtacgtaaactatcgactactgcgtcgattgagtctcctggaataccatacaagtgatctatatcccatgcttgtaatgctttaactaatgcttcatttgcttttatttttgccattattactaatagcctccctttcttagtgtctttttctaattagtaaaatagtaagattagaacaggtattaacactgaactaataactgcagttaaaatcatcccaattgaactaaatgcaccggattcaatatccatttctagtgctttagctgtgccaaatgcatgtgacgcattcccatacgttaaacctttggcgatagaagattcaaatcttccaaatcgtaataacatcgaacctaaaatactaccgattaaacccgttgtgataataaaaagtacggtcatcgtatctgtaccacctagttcatgtgacacttcgatacctactgcggctgttatagatcggggcaataacgttacaatgacgtctttagaatagccaaatgctttaagtgttaagaacactaacatgaaattcagcatgacgccagttaatacacttgcaaaaatgatagagacattgtctttaattttctctctatttttataaagtgggtacgctaaacatacgaccgttgcgtttaaaatatggttgatccaactgccacctttcatatacccgttataactaattccaaagataagtaagacaaaaataattcctaaagatgcaattaatgctggattcaaaaatgggttcggatatttttgttgtaaccttttagcgaaataatataaaacgacagtcaacaaaatcattaataaagcttgcacgtaatcattcataagcgtctacacctttacgatgtttatgtttaacagacattttttcagcaatataacctgaagataatgcaacgatgcatgttcctatgataatgactgcgaaaaagagtatataatttagcgtaatttcggaagcaacatccataatacctacaactgacggtatgaagaaaaagaccatcgtctttaataaaaagtttgcaccgtcttctacccaagttagcggtacaatcttaaattgtaatagtaaataaaataaaaatagaccaacaatactgccggctaagggaagatgaaaaatcttttgaatttctgtgccaatataagtaatcacaatgatgattcctagttgtagtagtagtttgattattaattggactttgtgcatggcgccatccctttctaaatatgtctaaattgttacaataactattataaagatggcgtacacaatataaaaatactctttttttatagtttgtattactattttctatggaaacgctctctaaatttcacttcattttcacaaaaaaacactcattatttcaatgacccacgtaatgatgcgccttaaataatgagtgctgtattaatatgttagcctaaacgatctttcaaaaattctatccatttcgttgtggcatgacttaattgtttatccttcttccaaacaacacctaattcccaatgtacatgcgcatcttcaatgcgtagtagcttcacatctccatttagttgctctgaaattgatgttggtaaaatactaatacctaattcattcgtaactaaatcttctataacatgccattgtgaaatttgcgctacagtattcggaacaaagccaacgtttttagcattttcaataattttatcattcaagtaaaagtctttattaaataaaatgaagtcttcacctgctaaatcttcgagtttaacagtttcatattttgcgagtcgatgctctctgctcacgataagtcgcaaatcttccttatctagggtagtataatcgaaaatatgataatcgactggcaaagtggtcacgcctatatctacttcatcattgataatttgctgctcaatcgtttttccgccattttctattaaattatatgtaacatttggatattgttgatggaatgcaccaagaatattgataagaatcttcatattcatgactgccgacatgcccatgtttatatgccctgtttccagtccattcaagcgttccatttcagatggtaaataatcatacagtgcaacaatttctttacttttctcataaaaaatttgacctgcatcggtaagtattaaatgtcttttacttctatcaaataagggcgtgcccatttcattttcaatatctttaattgctttactaattgtaggttgtgcaatatataatgatttggaagcattagtcatgcctccttgcttaacgacttcaataaaatatttcatatgtttgatatccactaacatcatcctaactatttcaacacgtttatttcattatacacaacttcttaaacattcaataaatttagatttataaaattactttataaaaagtttcatgtaaaatacacattcttttatgttattataataatggctcaagtatattaatcgaggtgaggtattgagcttttacgaatttatgcaaaattttcttggtgatgacacaccattaggtgaattggttgattggattaatcaagatagcaatttccctagagaagtgaagagccatagtgaaatattgtcatattttcgaacaaatccatgtcctgaaagcatctcagtacctgtaattaaacgggcactatcagttttcaaccaattcacaaatgtacaatgatacatgaatacatggagtcacatcatctcatgttagcgctctgattgcaggggcgctatttttaatgttatcgcttcatttattatgttgtgattgctattttctttcagttatagaaccacgtatcttttcttttaaatcattttatattttcccactaatatccgctgttaatcaatcctgacatccttgtatcactatgacacttaattgttagatacatgaatttctatattttatgaaaaaatccatttttattacaatttaacactttatatgacaacttcattacagttacttttattgttgattgcttgcattgttttctaaaaaaattttgttatcataaataacgttgaataaagaaaaaaattaacttgggagataaaaatggaatataaaaagatactaattcgtttattaattgcttttgcagtacttttctcagcagatttcacttatcaatccgtcgaacaaacgcatcaatcgcatgccgcagttaattattatagtaaaaaccaatgtacatggtgggcatttaaacgtcgcgcacaagtcggtaaacctgtttctaatagatggggcaatgctaaaaattggtattacaatgcacgtaaatcaaaatatgcgactggtcgtacaccaagaaaatttgctgtcatgcaatcaactgcaggatattatggacatgtagcagttgttgaacaagtatataaaaacggtagtattaaagtttcagaatacaacttttatcgcccattaaaatacaatacacgtgtactaagcaaaaaggcagcacgtaactttaactatatttactaatcaaaaaacttctatcacgaacgcttcaaattcctgtatgcgtgtgatagaagtttttattttttgttcatattaatttatctaagcgctatgatggactgacttaaacttttctttaaaatcgctattcgcatttgattattgttggcttcttaaatcttgtaaaatgcgttcagctacttgtgtattcgcacggggttcttgcttcaatgcttcagctacttgcgcaatttcatcaccttttgcacctacaacaatagctaaagatttatattgcaagctcatatggccttgctggataccttcggaaacgagcgcgcgacatgctgcaaagttttgtgctaaaccagcggcagcaactacatgacctaattcttgtgctgaatctacatttagcaattctaaagaagctttagcaattggtaatacttttgtaccaccgccaacgattgccaatgtcataggcacttctattgtaccaattaaacgttgacgttcttgatcgtatctccatgttgcaataccacgatattgtccatctctacttgcgtatgcatgcgcacttgcttctgcaccacgcgtatcatttcctgttgctaaaacaacggcatgtatgccattcataacacctttattatgtgttgcagcacgatgaatatcaacttgtgccaatacagaagcacgttccattcgtttggcaacctcttctccagttctctcgccccttgctaaatctttaacatcaatttcgccttgaactttaacaacggacgctgttgcatgattggataaaatactcattaaaatgtcgctttgcggaaattcattttttaaaaatgcagttatggcctctaaaatcgtattaagcatattagcgcccatagcatctttcgtatcaacaaatacttttaaagatagtaactgttgctcaggaaatgtatcaatagctatacgttggtaaccaccaccacgcgctttaatagaaggatatgcctcatccgcaattttatgaatttgcttttctaaagctttaatgtctgctgataatttttcagtatcgtcaacgctatcaaagacgatttgacctatcataatacgttcagaagataccgttttaaatccgccagtctgattcactagctttgcaccataactagctgcagcgacaactgaaggctcttccaccatcataggtacaacatatgccttatcgtccacaatgatattcggtaataatccaacgggtaatgcaccttgcgcgatgacattttcaattaaactatttgctacttcctcatcaattaatggatgattcaataaaatgttgaattgctcttctgataaccattgcttatctaccaattgttgtaacttttgttggcgagataaatgtcggaaattcttatctaaactttgcatggacatactccttttacttcacataattttttaacatttcaatcactactatttttaccataaaataacgttattcgtcttaaaattcaattgaataattattgttttaactataaaataaagcaaggtaaattaaaacgcttacaagaaacgtcaaatcatttttaaatttagtgtatttctttgtataagattagcatattctgatatgatacaagtgttgcttttataaatttgaaaggatgtaaaaccttatgataataggtatcgacaaaataaacttttacgttccaaagtactatgtagacatggttaaattagcagaagcacgccaagtagacccaaacaaatttttaattggaattggtcaaactgaaatggctgttagtcctgtaaatcaagacatcgtttcaatgggcgctaacgctgctaaggacattataacagacgaagataaaaagaaaattggtatggtaattgtggcaactgaatcagcagttgatgctgctaaagcagccgctgttcaaattcacaacttattaggtattcaaccttttgcacgttgctttgaaatgaaagaagcttgttatgctgcaacaccagcaattcaattagctaaagattatttagcaactagaccgaatgaaaaagtattagttattgctacagatacagcacgttatggattgaattcaggcggcgagccaacacaaggtgctggcgcagttgcgatggttattgcacataatccaagcattttggcattaaatgaagatgctgttgcttacactgaagacgtttatgatttctggcgtccaactggacataaatatccattagttgatggtgcattatctaaagatgcttatatccgctcattccaacaaagctggaatgaatacgcaaaacgtcaaggtaagtcgctcgctgacttcgcatcactatgcttccatgttccatttacaaaaatgggtaaaaaggcattagagtcaatcatcgataacgctgacgaaacaactcaagagcgtttacgttcaggatatgaagatgctgtagattataaccgttatgtcggtaatatttacactggatcattatatttaagcctaatatcattacttgaaaatcgtgatttacaagccggtgaaacaatcggtttattcagttatggctcaggttcagttggtgaattttatagtgcgacattagttgaaggctacaaagatcatttagatcaggctgcgcacaaagcattattaaataaccgtactgaagtatctgttgatgcatatgaaacattcttcaaacgttttgatgacgtagactttgacgaagaacaagatgctgttcatgaagatcgtcatattttctacttatcaaatattgaaaataacgttcgcgaatatcacagaccagagtaatctgtgtatttgaaagacatttaaatataacctaaaaacagcagtaagacagcttctcattgaaatcgtcttactgctgttttctattcataatgcttcgtcttgaatgaattcattatgtctatttgacacattattgaagtttttctaagaacttaatttcctaagctattctattttaaattgtcaaagtcaaagtaccctagacgcattttatgttggaacgacctatttcatataaatatctatatgactaatattatcaaaatcaaacgttttttcttgtgagtcactcaatatgtcgcctaaatctattttatgtcttgctccatttttcatttctataattagttcccctgaattgtaattactatataggtgttctttttctaataaatattttctaattctaaaatctgtttcttttagagaaatctgtttattcttaacttctaataaactgtctggattcactttagtttgatgaccgttaacaaacaagttcattctataagataagttagttacttttgatataggatcatacttaactactgtgccacgatatactttagattgttggttttcatataatgttccccatatattaactttgtcttgatttttaaactgtttcaaataatcagtgttgtagagcactgtccgtacattgtaggtgtcaactttcgtgtctatataattttccccaactcctgttacttctttattcgtataaacttcaaatttttgtgcataatgctcttttaaactgtcattactattttctgtaatcaatccagttgtttttgcttttacttctgctattccaatagatcccgttactgcaatcaaaaatgccaaagttgtcaataaaaaccatagtttcgctttcattttcagatcatcctttctcatttaagattaaatgcatcaaatgctttgcgcgcaatttaatgttattaccgaatgatctatatatcaatatttctagatgttaattttctaaaattatcattaatttagtttgattagtttttaaaataatttaacgtatttaacaatgcatagatttatttttctaacatatttatacgttacggcttcgtgctatgttttggtacataaagctttgacatatcgatattctccaactctaacagcttaattttattattaatcgttccaccgaatcctgttaagctacccgttttaccaacaacgcgatgacatggcacgataattgataatggattgcttccgactgcacctccaaccgcttgtgctgacatttttggcttatcaagcaccttgcctacttttttggcaatagcaccatacgttgttaacgtcccataaggaatctgtcttaattcattccaaacacactgttgaaaatgactacctgttggctttacaggtattgtgatttcaggattgtcacctttaaaatacgcgtctaaccactgtgtcgcctctttaaatatcgctaaagacgtattttcttccctagtactatcatcttgttgattttcaaacaaaacagcggtcagacttatcccatcactcacaagttccaatcgtcctacaggcgaatcatagtaactctgatataccataaacacacactccttttgcatcatcatactattcatttaactttatgaaaatgattaacactttatgctttatcaagatcaactattcacttccaaatcaaaattcacatagactaccaacacaatataccatttcttaattaactatgtatcaacacatacgtttcttaaccattgattaatatttacttttaaattcttacttacttcaaaaattacacaaaaagttcataaagtgcctacaatgcgccgttttcaaaactacaatggtggaaaaatagaattgccattgtttatattttgcatatagtttcaatgtattttcttttacttattagtttaaaaatttagaggtgatgtttatgaataacaattttttcaatagtgacttcgattctattttacgaagaatgatgcaagacatgcaaaactcaaatcagactagtaacaagaaatactatattaatggtaaagaagtttcaccggaagaattagcacaatttacgcaacaaggtggtaatcattctgccgaacaaagtgcgcaagcttttcaacaagcagcactaagacaacaaggtcaacaaagtggcaatggcaattatttagaacaaattggtcgtaacttaacgcaagaggctcgtgacggattattagatccagtcatcggtcgtgataaagaaatccaagaaactgcagaagtcttaagtagacgcactaaaaacaatcctatcctagtcggagaagctggagttggtaaaactgcgattgtcgaaggtttagcgcaagcaatcgttgaagggaacgtacctgcagcaatcaaagataaagaaattatatctatagatatttcatcgcttgaagctggaacgcaatatcgtggcgcctttgaagaaaacatccaaaagttagttgaaggcgttaagtcatcacaaaatgctgtgctcttctttgacgaaattcaccaaatcatcggttccggcgcaacaggaagtgattccggtagtaaagggttatctgatattttaaaaccagcattaagtcgtggtgaaatttcaattataggtgcaacgactcaagatgaatatcgaaacaatatcatgaaagacgctgcattaacacgtcgttttaacgaggtgctggttaacgaaccaagcgcaaaagatacggttgaaattttaaaaggaattcgcgaaaaatttgaaacacaccatcaagtcaaattacctgatgacgtattaaaggcatgtgtagacttatccattcaatatattccacaacgcttattacctgacaaagcaatcgatgtattagatattacagctgcacatttatctgcacaaagccctgctattgataaagtcgcgactgaaaaacgtatttctgaattggaacatgataagcgtaaagctgtaagtgctgaagaatataaaaaagcagatgacattcaaaatgaaatcaaatctctacaagatatattagaaaacagtaatggtgaacatactgcagtagcaacggtgcatgatatttctgataccattcaacgattaactggtattcctgtatctcaaatggatgccaatgacattgaacgtttaaaaaatatttctagtcgtttaagaagtaaaatcattggtcaagataaagctgtagaaatggtttctcgtgccattcgtcgtaatcgagctggttttgatgatggcaatcgtccaattggtagcttcctatttgtcggtcctactggtgttggtaaaacagagcttgccaaacagttagccattgatttatttggtaataaagaggcactgattcgacttgatatgagtgaatatagtgatactactgctgtttctaaaatgattggtacaactgctggctatgtcggttatgacgataattcaaatacattaactgaaaaagtacgacgcaatccatattcagtcattctatttgatgaaattgaaaaggctaatccacaaatattaacattattactccaagtgatggatgatggtaatttaacagatggtcaaggtaacgtcatcaactttaaaaacacaatcattatttgtacgtcaaacgctggttttggtaacggtacagaccaagaatacgatgacattatgcaagaaatgaaaaaattcttccgtcctgaattccttaaccgcttcaatggtattgtagaattcttacacctagataaagagtcactacaagaaatcattaatttattgttggatgatgtccaagtaacattagataaaaaaggtattacgatgaatgtctctcaagatgcaaaagattggttaattgaagaaggttatgatgaagacttaggcgcacgcccattaagacgtattgttgaacaacaagtgcgtgacaaaataacagattattatttagatcatacagacgttaaacatgtggatttagatatcgaagacaatgagttagtcgtcaaaggtaaatcatgatactttaacatatagcgtatcaaaaaaatgagcatcaggacgccctcgcctgtgctcattttttaaattatttcccaggaaaatgattcgctgtgtgttgttctgttccacaacaatcacgatcaatgtcacatgtgccacatttcccttgtttcgaacgtttgaaaaatttaactaacgtatacaaggcatatccgaaaattgctaaaaaaattaaaatgttaataataactgacactttaaccactccttaaacaaataaatgtccgacttgataaaaaatgaatgttaagacatatgcagtgactagaggataggcaactgcaagtgccgtccatttccatgaataagtctctttacggattgctgccactgtagaaacacaaggaatatacaatagtataaatatcataaatgcatacgcagatagcggtgtaaattgattttgaatcacattgacaaggcctgcatcacttgatgaatagataatcgccatcgaacttacgataacttcttttgctaaaaattctggcactaacgtagcacctgcttgccatgttccaaatccgagcggttgcactaacataccaaagaagctaccaaccatatgtaaaaaactttgattgatattcacattgataccatgtggccctacataacttaatagccaaatgactactgagccgccaaaaataaatgtacctgctttacgaacaaagcccttagccttttcccaagtactacgccacaacgttttaatggaaggcacacggtatgttggcaattccacaataaagattgcattatcattttttaaaactgtcttagtaagtactgtactgactaaaaatgccataataatacctaaaacatacaggcttaatactactaaagattgattctctttgaaaaagatacctacgaacaatgcatacactggcagtctagcagagcatgacatgaatggtgcaattaatatcgttgttaaacgctctttttcattttcaatactgcgcgcagccataatactcggtacgttacaaccaaatccgataatcatcggtataaaagacttcccgcttaaaccgaacgattccataatacgatccattaaaaccgcaatacgtgccatataacctgaatcttctaataaagatataaagaaaaagagcacaacaatttgtggtacaaagactaatactgatcctacaccagcaataatgccatctgtaattaaatcttgtaaaaatggtataacaccaagataattcataatcgtcttcacactatccgtaaatgtaccacctataaatgcatcgagttgatccgacaaaggtgtgccaatccatgtaaatgtagtttgaaagattaaccacataatcgctagaaagatcggcatccctatatatttatgtgttaatatcttgtcaattctagagctgaaatattgcttatcttcatctggatacgttaccacgtcttgcaataacgtctcaatataatgattgcgtatacgctccatctctcgacgaacagatacagcttctacttgttcggcaacttgatcacgaaaactcgacaatttatttacaacctctgaattaagttcgtttgcaatttgcatgttatttaataagaattgaatcgcaataaacctagcttgatacttatcatgagatgtctctgtcattattatttgacacatatttttaattgtctcttcaatcttctcaccataattgattttaaaatgcggttgatacccttcccctagatgctttatttcgccaagtaaatgtttagttcctttgcctgtacgtgccacaactggaaaaataggtgtttttaactttttcatcaatttatgataatcgatttttatcccgcgctttgtagctacatcaatcatatttaatccgatgtatattggtttattaagttctaacaattgtactgttaattgcatatttctttttagttgactcgcatcaacaatgttaatgattcctgaaaatgaatcgtttaataaatagtctgtcactacagtttcatctttagaaatcggcgataaatcatatgtacctggtaaatcaattaattgtcctacattttctttaagcttccctacttttttctctaccgttacgccactccagttgcctatatattcatacgaaccagttaaagcgttaaacaaagatgttttaccaacattaggatttcctaaaatacaataattttccattcgtccggctcctattcttctaatgcaatagaacaagcatcgcaatgtctaatacttaactgttgtccgtttacttcaataatacatggccctttaaataaacatttttgtttaatcgttatgatagcgtcatctgttaacccaaaggcacttagacgatacaacatattctcattagcaatatccattcgctttattttataagccttattcatttcaccatttttaatgtttaacatactatttcgctctcctattagaaataataatcattatcacttaaaaatcataacctttaaaattatagctcgcaatactttatttaaataattttcatttttcatgtaaaatttgtgacattgcaaaaatattttgtataatcgcttccatgcaaaaaacctccgcttcaaatgtcattgatagacatttaaagcggaggcatgtacatgttattttatgatttatttcttaagtttttttctaacaattgattgagcttttcaatatttttattcaactgttctatattcgttgtttgttgttttgaatttagttgatgcttgttttgataatccattaaagcatcatataaaaacaatgaacttgctgattgctgtttcacttcttggtacaatgccatcgttttatcatctagtactattgaacgtgcatcatcttgcccatgtacatcttgatgtttcgatacatttgttgcaccttgtggatatactttaaaggttgtgtcgtatgtttccttactatctttagattcagattcctgtgattcaaccgttttatatttttcaagtgcatgtccttcaatatcaactcgtggaataatgcgattcaaccatgctggtaaataccacgaaccttttccaaacaatttagttaatgcaggaattaacatcattctgactacgaaggcatcaaagagtacaccaaaagctaatgccatacccattgatttaatcatgacatcttcttggaatacaaacgcaaagaagacactaaacatgattaatgcagctgctacaataacaggaccactttctttcaatcctactttgatagaataatcattatcccctgttttactatattcttcatgaattcgcgacataaggaagacttcgtaatccattgctaagccgaatagtataccaattgtaataaccggcaagaaggctagcattggtcctgtcgtttctatgccgaataatcctttcataaagccatcttgcattacaaaggttgtaaaacctagtgttgccattaatgacaagacgaatcctaaaactgcttttaacggtattagaattgaacgaaagacaatcattaataagaaaaatgccaatacaacaattactgttgcaaataaaggtatcgcctcatttaactttttagacatatcaatattaatgacactttgtcctgaaatctccgttttgaacccatatttatcttgtgcatctttatgataatctcgtaaatcatgcactaaatcgtttgtactctctgcattaggcccttgcttaggtatcacgaccatcaaagcgtaatcattatctttactcatttgtggcggcgtaacaatatctacatttttcttatctttaatatctttatacacagattgtaaatcttgttgtaatccttgtggatcatcttttttatctttaacgttaatcagcatcggtatttggccattaaatccttcgccaaacttatctgaaataatatcgtatgcctttttctgagtagaatctgctggctttacgccatcatccggaatgcctagacgcatatgactaactggaatagccgctgcaactaatataattaaacctaataatactgctgcaagtgcattaccagtaataaatttagaccacggcgtatcaatatcttttttaaaattagactgcaatttgttcactttaatgcgtttatggaaaatgctaattaacgcaggtaataaagtcagtgcactgaatacagcaaatataacactaattgccgaagcaaaccccatcactgctaagaaatctatgccaactagcgataaaccacatacggcaatcacaactgtcacaccagcgaagatgactgcgctacctgctgttcccactgcaagtccgatacctttaacatagtctgtttcagttttcattacttgtcgatatctaaacaaaataaataatgcataatcgataccaacagcgagcccaatcattaccgctaaagttaatgtaacattaggtatatcaaagacataggtcaataggctaataatgccaactccagatgctaaaccaatcaatgcacttataattggtaatcctgcagcaatgactgaaccaaatgtaatcaataacactacaaatgcaacaatgataccaactagttcagaattaccgcctacttctgtagaggtcatacctgttcctgttaattcagtctgtacattatgattgtcacgcaaatcttttaaatgacttttaatattatctctagaatcatctttcaaagatgtttgactcacgttatatgtgatatctgcaaatgccgttgttttgtctttactaatttgcttattttcatatggatctgatactttatcgatgtgtttgtcatcttttttaatatcgtctaacgttttcttaatatctttagtgatactcggttgcacaataccatcatctttagtcgtcttaaagaccacacgtatttgtgccttctcactatcttgattaaaatacttttcaatcttttcattcgtgtctaatgactttaatccagtcattttaatatcattgtcaaatttcggtgcatttgtagcaattggtataaatattgcagctacaattattacccatgcgattaatgtggaccacttatgctttgcgataaatgtacccatcttgtataaaaatttcgccaaatatattgcctccctttaaaatcaacgttatagtttaactatacagtgtagattattgttcgattatagtatctataccatgcatcttaaagaactaatttttgaattctgtattttaaactacatattaaggagaaatgtagatgaaagagaccgatttaagagtgattaagacaaagaaagcattgtcttcaagtttgcttcaattgttagaacaacatctgttccaaacaattaccgtcaaccaaatatgtcataacgcgctcgtacaccgtacaacattttataaacatttttatgataaatatgacttacttgaatatttgttcaatcaattgaccaaagcatattttgcgactgatattagtgatcgccttaaccacccattccaaacgattaacgatacaattaataataaagaagacttacaaaaagtagcagacttccaacaagaagatgcagagtttaataaagttttaaaaaatgtttgcattaaaattatgaatgacgacatcaaaaacaatagcgacagaattgatgtcgatggagatattcctaataatttactattttatatatacggttcattgattgaaggatttttacattggattaaagatgaaaaaattgattggcctagcgaggaaattgataaaatttttcataaggtaataaatattaagattaaatagtagattagaggctcataagcgttaccaacattcataataaaaacgatagtgtacacgttaatgaattcgtgtactactatcgctttttatttttatcgtgcttatcgcttttaaaataactgatacacaacacataaactatgaagaaaaaaataaatccgctatctaaatgactttgactcagttgtttaaatgaccaaattgctaatacaattcccattattattgaaataacgtatctcacattcttatacctataatccttttctaaaaatatggttgctattacttaatttttaaagttataaataaaaagagccaaccgcaatggatggcccttgttcattatgaagcattagaacacttctgaaacaaccttttgttctaagaagtgtaataagtagtctgggctacctgttttagcgtccgtacctgacattttgaaaccaccaaatggatggtatccaacaactgctgaagtacagcctctgttaaggtataaattacctacatcaaattcgtttaccgctttaatccaatgctcgcgattatttgtaatcactgcaccagttaaaccgtaatctgtatcatttgcaacctcaattgcttcatcaaaatcgttaactttcacaaagccaacaactggaccaaaaatttcttcttgcatgattctatctttagatttaagtcctgaaatgattgttggttctacaaagtaaccttttgaatcatcagtgccgccaccttgttctaatttaccttcttctttaccaatctcgatataatttttaatcttatcaaattgttttttattaataaccgggcccatatacgtattgtctacagtattgcccaacgttaattcttttgttagtttgattgacttttctaatacttcgtcataaacgtctttatgcacaattgcacgtgaacatgctgaacatttttgaccagagaaaccaaacgctgacgttacaatagcttctgctgccatatctgtatcaatattttcatcaactacaatggcatctttaccacccatttcagcgataacacgtttcaagaagttttgaccttcttgaacaacggcactacgttcataaattctagtacctgtcgcacgtgaacctgtaaatgtaacgaaatgcgtatctttatgatcaactaagtaatcaccaatttctttcggatcgccaggaacaaagttaactactccttttggtaatcctgcttcttctaaaatttccattaatttataagcgatataaggtgtatcctcagcaggtttcaataacactgtattacctgcaacaactggtgctaaagtcgtaccagccataatcgcaaacgggaagttccacggtggaattgtaacacctgtaccaattgatttatagaaatatttattgtgttcaccttcacgatcaagtactggcttaccttgagccaaatccatcattgaacgcgcatagtattcaataaaatcaataccttcagctgcatcgccaactgcttcatcccatggtttacctgcttcataaaccataattgccgcaatttccgcttttcgacgacgaataattgccgaaacacgtaacataagctctgcacgatcatttgctgaccatgttttccaagatttataagcttcgtttgctgctttaaatgcatcttcaacatcttgttttgttgcctttgatgcatttgcaatcacttgtgatgtgtctgcaggattgattgatttaattttgtcatctttgaaaatcttctctccattaatcactaatggtatgtcttgacctaattctttttccacgtctttcaatgctttcttaaacatatccacattttcttggactgaaaaatcgtaaccaggttcatttttaaattctactaccatgtacacttaccccctataaattttgaaagtggtttaaccctttgatttaatgatataacatcatttaaactcattttactatgagtaaggtcggttttgcaatcgctttcatttttctgctttatacctttcttctcaagcattttgaaaatgattagttactttttaaaatttagaagtgtcatgacaactaatatagtgtttcatcgttcaatgcttctgatggtacctcattatcaattttacgaacgactttacaaggatttccaaccgctaaactgtgtggcggaatatcttttgtgacaacactacctgcaccaatcacactaccttctccaatcgtcacccctggtaacacggctacatgaccgccaaaccaagtattactgccaatatgaatgggtccggctttttcaaaaccttcatttctatgatgaaaattaagtggatgtgttgctgtatagaatccacaattaggtcctataaaaacattatcgccaattgtaatctgtccaccatccataaaataacaattggtgtttacatagacattttttcctagtttaacgttccaaccataatctgtatcaaaaggaatcgaaatacttacattgtctgttgttgtttgaaataatttatcgattaattcctttcttttatttgtgtcactcggtcttgtatgatttaattcaaagcaaatatctttcgctcgtgcacgttcatttattaagtcttgatcaaagtttgcatcgtaccatttttctgctaacattttttctttttcagtcattacacctttcaactcctaataacttatttacttgtttaaaagttaatcaaataaacattcgcctatgcaactaatacgctataacattatgaaatcatgaccttatcacccttatctaaacaattctcgcatcaaatactgctaaagtagtagataaattcaatactacagacgcattcattttttaatctattaacgtacaatgtgagtaagagaaatataaaggagtatgatagcgatgagaatattaattacaggcacagttgctatcttaatcattttaggtttggtcaaaacgatacaagattacgaaatgacaaacgacacgagtcgtcagttgtcagacaacaaagatgatgataaagtcatccatcttaataattttaaaaatttacatgctaaagaatttaacccatctgatttcttttaagtcacccaagaattgcaaatccagaagtcatttaagttttacctttcattcatacatcctttaatattaattacgacttcttttatatagatgctaaatagagagattgttgtgcaatgtttgcacggcaatctctctttttctttttaaaattggtaaaagtaaaacgcaacgattgacttatatacctatagggggtacattagacgtgtaacaatgaatcacagggaggcaataatgtggctaatacgaaaaaaacaacattagatatcactggtatgacttgtgccgcatgttcaaatcgtatcgaaaagaaactgaataaacttgatgacgttaatgcccaagtgaatttaactacagagaaagcaactgttgagtataaccctgatcaacatgatgtccaagaatttattaatacgattcaacatttaggttacggtgtcgctgtagaaactgtcgaattagacattacaggcatgacttgtgctgcatgctcaagccgtattgaaaaagtgttaaataaaatggacggcgttcaaaatgcaacggtcaatttaacaacagagcaagctaaagttgactattatcctgaagaaacagatgctgataaacttgtcactcgcattcaaaaattaggttatgacgcgtctattaaagataacaataaagatcaaacgtcacgcaaagctgaagcgctacaacataaattgattaagcttatcatatcagcagtattatctttaccgctattaatgttaatgtttgtgcatcttttcaatatgcatataccagcactatttacgaatccatggttccaatttattttagctacacctgtacaatttattattggatggcaattttatgtaggtgcttataaaaacttaagaaatggtggcgccaatatggatgtacttgttgctgttggtacaagtgcagcatatttttacagtatttatgaaatggttcgttggctaaatggctcaacaacgcaaccgcatttatactttgaaacaagcgccgtactaattaccttaatcttattcggtaagtatttagaagctagagcgaagtctcaaacaaccaatgcgcttggcgaattattaagtttacaagctaaagaagcacgcattttaaaagacggtaatgaattgatgattcctctaaatgaagtacatgttggagatacacttatcgttaaaccaggtgaaaagatacctgttgatggcaaaattattaaaggtatgactgccatcgacgaatctatgttaacaggtgaatctatccctgttgaaaagaatgttgatgacactgtaattggttcaacgatgaacaaaaacggtactattactatgacagcaacaaaagttggcggagacactgcgttggcaaatattattaaagttgtcgaagaagctcaaagttctaaagcgccgattcagcgattggcagatattatttctggttatttcgttcctatcgttgttggtatcgcactattaacatttatcgtgtggattactttagttacaccaggtacatttgaacctgcacttgttgcgagtatttccgttcttgtcattgcttgtccatgcgcattaggacttgctacaccaacttctattatggtaggtaccggtcgcgctgctgaaaatggtattttatttaaaggtggcgagtttgttgaacgcacacatcaaattgataccatcgttttagataagacgggtaccattacaaatggtcgtccagtcgtgacagattatcatggtgacgatcaaacgctacaactgcttgctactgctgaaaaagattctgaacacccattggcagaagccattgtcaattatgcaaaagaaaagcaattaacattaactgagacgacaacatttaaagcagtacctggtcatggaattgaagcaacgattgatcatcaccatatattggttggtaaccgtaaattaatggctgacaatgatattagcttgcctaagcatatttctgatgatttaacacattatgaacgagatggtaaaactgctatgctcattgctgttaattattcattaactggtatcatcgcagtggcagatactgtaaaagatcatgccaaagatgctataaaacaattgcatgatatgggcattgaagttgccatgttaactggcgataataaaaacactgctcaagccattgcaaaacaagtaggcatagatactgttattgcagatattttaccagaagaaaaagctgcacaaattgcgaaactacagcaacaaggcaagaaggttgcgatggttggtgacggtgtaaatgatgcacctgcattagttaaagctgatatcggtatcgccattggtacaggtacagaagttgccattgaagcagctgatattactattcttggtggcgacttgatgcttattcctaaagccatttatgcaagtaaagcaaccattcgtaatattcgtcaaaatctattttgggcattcggctataatattgccggtatccctatagctgcattgggcttacttgcgccatgggttgctggtgctgcaatggcactaagttcagtaagtgttgtcacaaacgcacttagattgaaaaagatgcgattagaaccacgccgtaaagatgcctagattccttaataatgaaggattcgttggtgattctgaggtaggctagtgattggctctataatgtcgcggtttacagttggatcttcgctccaactgcataagagcctgagacataaatcaatgttctatgctctacaaagttataatggcagtagttgactgaacgaaaatgcgcttgtaacaagcttttttcaattctagtcaaccttgccggtggggccccaacaaagagaaattggattcccaatttctacagacaatgcaagttggggtgggacgacgaaataaattttacgaaaatatcatttctgtcccactccctaaaaggaggtgaatgctatgtcacaagaaattttaaatgttgaaggtatgagctgtggtcactgcaaaagtgctgttgaatctgcattaaataatattgacggtgtcacttcagctgaagttaaccttgaaaatggtcaagtaagtgttcaatatgatgacagtaaagttgctgtatctcaaatgaaagacgcaatcgaagatcaaggttacgatgtcgtttaattaggcaatattcaacgtcatcaacaccaaattaaaaaatcgaactgatgagaatcccaacaatccaaattatctcatcagttcgatttttaatttactcgtaacctagtatctccagtctgcaatacatctaatgttgcatctaatgcatcgacaattagattttcaactgcagcttcagtataaaacgcaatatgtggtgttaatatgacatcttccctgtcaatcaacgattctaacaatggatcgttcagtgttttgcccctttgatcacttgggaaaagtttgcgttcaaattcatacgtatcaagtgctgcacctttaatcacaccattgtctaatgcgtctaataacgccttagtatctactaaagaacctctcgcacaattgacaaatactgcgccctttttaaaatgtttaaataattcagcattaaatagataatgattatatttcgttgcaggtacatgtaatgtcacgatatcagcaccttcaaccgcttcctcaatcgtatctttgtaatcgacatacgttgcaattttagcattaggaaacgggtcatatgcgaccacatcactttgataaccattggcaaatatatcggctactacacggccaattcgacctgtaccaataacagctacttttaaatctttaatggatttcgataaaatagtaggttcccatctaaaatcatgctctcgcactttcgtttgaatttgattaaaatgacgaaccacattaatagcctgggtcacagcaaactccgcaattgaattcggagagtatgacggcacatttgacacaatcaagttatacttgtttgctaactccaaatcatatgtatcaaatccagcactacgttgtgcgatttgtttaatacctagttcatttaatcgtttataaacatgctctgataatggtatttgttgtgatagcgataagccatcataactagcgacatcttcaacattgtcatcagttaatgcttctttagtaatatctacctcaacatgatgtttctctgcccacgccttgatataaggcatatcctcatcacgtacactcatgattttaatttttgtcattttaacatcacccttaactttattattcatataaatatgctaattctgttaatcttattgcagcttcgtctaattgctggtcatctaacgccaatgagattctcacataacgattaccattctctccaaatggtttccctggagcaacaagtattgacttctctttcactaaaaattgctcaaattgctcgctgtcataaccaggcggtgtttccaaccatacatatataccacctttagcatgaacaaatggcaaatcagcttttgcaagcatggcttcgaatcggtcacgtcgtgctttaaatacattgctttgttcttctaaaaaatcatcataatgattcaaagcatatattgcggcatcttgtaatgcaccaaacatcccagcatttgtgtgcgtttggtactttttcaaagcttgaatcatatctttattaccaactgcaaaaccaactctaaaacctgacatgttataacctttagacaaggaataaatttcaatcgcaacatctttcccattttccgaagcaagtatactaggatttttagcgtcgaaaccgaaagcaccataagcaaaatcatgcacgattttagtgtctgtatctttaaatttagctatcgcttcatcaaaaacttctttcgtagctgtcgatccagttggattatttggatacgttaaataaatgagttttgttttatctattatttgtgaatcaactttggaccaatctggcaaataatgcggcggttctaaattaagcgaaacaggcttgccatcagctaaaagtacacctgctaaataatcagtgtagcctgggtcaggtagtaatacatagtctcctggattgataacacatgttggtactgccactaatccattttttgtaccatataaaatacatacttcatcttctttatctaacgtcacatcatattgtctttgataaaaatctacaatggcttgcttgaacatctctttaccatgaaaagcaccatatttttgattttcaggaatagttagtgctttttgaaaatgatcaataataccttgtggcgtgggcccatcagggatcccaactgccatattaattaatggcaatggtccatgttcgattttacgtcccatcgttttcccgaaataactatcagggatatttgctaatttgttagagatcatcaaattcctcctctatcattaaacatagcctgggcgactatcataatcctaacaacttgtatcactctcatttagatggttacaatgacatcgccattcaccgttatgttcaacagaacttatgacacacgttgtattgaatgaatttattttcattttaggtaggtataatattattgtcaatattaggaattttcagattaatatacactcaatcgttatgatttaactgccatgcatatccgcatgggcaaccagttagatatgcttatataaagtataacgcccatcaaggtacgtattcaaacgtgaaccttaacaggcgtcattcattgttaaataaaacttcttaagcacatacttatttcactataccttttacgttccccttatacttttctcacatctttctcttagactactcccttacacgccctgctcaatatctttaatcatttcatctacagttattttcgcactcgttaagacaataggaacgcctgcacctggatgcgtacttgcacctgcaaaatataaatctttataatctcgcgatacattttgtggacgataataattactttgcgctaaagttggcattaaaccgaatgccgaaccaaatttcgcatgatacgtttgctcaaaatcatttggcgtaaagattgtttctgaaacaatatgcgattttatatcttcaaatacttcaattgttgctaatttacgataaataatttcctttatttgttgcgtcaaagcttcatctgaccaatcgattccgctacctgttttaagttccggagtcggcattaacacataaataccagttttgccttctggcgcaagtgatttatcagcgaccgctggaacatacacataaatagaaggatcatatgataaacgtccctcaaatatttcttcaatattgcctctaaaatcatctgaaaaaataacattatgaagtctcacttgatctgtcacatcaatatctataccgatatacattaaaaatgctgaacaagagtaatctaagtctgcaattttatgtggtggatactttttaataggtgcaaaatctggcattaatgattccgcaacactagggaaatcagccgtacataaaattttatcaaattttcttatgtcaccattcacttttatcgcatcagctcgtttgaatttaggatcaataataatttgctcaatttcagcattaagttcaatattaacgcctaaatctttatttaattgcgttagcccttgagccatgccatacataccacctttaataaaatgcacaccaaacatcatttcaatcataggaataattgaatatagtgacgggcctcgttttggatcaattcctatgtataacgtttgaaacgctaaaagcttttgtatcttttcgttatcaatataatgttcaattagctgatctgcatgatttaacgtttttaacttagcaccttgcacaagtgacgtcatattataaaagtcacttggtttgcgatacgttctttctaagaaatagcgacgtgcaatttcatattttttataaacatccgttaaaaaggacataaaaccatgcgttgaaccaggttctatactttctagcatgtgctgtaattcagctaaatctgtaggcaccgttatacgatcatcgcggtcaaaatacacatcgtaaatataacgtaattgtctcaattcaatataatcttcataatttttaccacacattgtaaatacatctttataaacatctggcatcatgacaattgtggggcccatatcaaatgtaaagccgtctttctttaattgattcatacgcccgcctacattagtatttttttcaaatatcgtcacttcatgaccttgagaagcaatacgggctgccgctgctaatcctgtgacacctgcaccaattactgcaatcttcattattcaaccacctatattctatgatatttactatttatttcatgaaacaactttgcttttttcctcttatccacaaaaacacgttcatgtaatgtatagttagcctgtctcacttcgtccagtatttcaatatatatacgtgctgctaattctatgattggttgtgcttcaatactaaatactttgatttgatccataacatctcgaaaatctttttctgcgatagctgcataatattcccataagtcaatataatgattattaacaccattttggtacacttcagcaatatcaacttcatattgctttaatcgttgcttactaaaatatatccgttcattttcaaaatcttcaccgacatctcttaatatattaatcaattgcaacgattcaccaagccttcttgcgacatcgtatgtctgatgtgtttcatgatcacttaaaatcggcgtcaatacttcacctactgtaccagcaacaccataacaatatccgaataattcagcgtccgtttcaaacattgtaaaatgttgatctttatatacagtatcaatgagattatagaaagattgaaaggcgatatttttatgttgtgcaacatgctgaagagccatcatgattctacgatcactttgaaagtgatgatgttcatatgggtatttttcaatagattgtatatcttcttttatttgatttaaaaattgaatatcgccataaacatctatactgtcatcaattttacgacacacagcataaattgcccaaaccgcttttctttgatcttctggtaacaagtcaaaagcgtaagaaaagctttttgaatgtttcttcatgattttatgacaatatttaaaattcatatccatcattgtcatactagtcctcctatattgaaatgccattaccttgatttattgttctttagatatagaatattgacgacctttccattcaactacaccataacgatgcgtttgtttccaagattggatgaaaattttagtaaaaaacataaataacaatggatgacataccattaataaattagaaaattggccgacccttcgatgcaaataaataaattgtgtagtatagctcaagtaaactgttaacatttttcctacagacatttggcgatattttaaactaagacatagccctaaaatactcgcaatagaaccgaacaaccacaacacaattgctgccatgattttaggctttgtgccacctgccccagtcgacaaatgctttgtccatccttcttgtaatgactgaaatccttcttgatacatgcgaaatgcaacaaatggaaatccttcataaactgttacgggcaatgattgtgaagtatatgcacttcctaaagcaaatccttcaataatatgacggttcgcacttttatgacctccagttgcataataatcttctttatttgttaatgtcaccggtccaaatgcatgctggttagtccgaccatcgtctaaggtagaaaatacattcataccaacgactgtcattaaattaaatatcgctgaaaacccttcgtagaaacgttttgttatgtgataaggctgtacgcttaacaatcctttttcaccttgtaattgatactgattaatcaacgtttcaacagcatctttccttaagaaagttacatcagcatctacaaaagcaatacgattcgtacatgcatgcgtcacaccttgataacaagcatgtgatttcccataccatttgccgtcagcatcatcaacaacatctactacagtcgcaccatatgaacgcgctacacgtgctgtgtcatctgtcgatccgtcattcataacaatgacatctactggaacttgctgttgtattatcgaatgtagtaaatgacctattcttttttcttcgtttctagccggaataataattgttaatgctttatgattgaagttcagcgttttcgcctttagctgatgtctacgattaaatatcaatgcaccacacgccatagacatggtcactattactgttaatattcgtgataaccatttcatagatatcacttcctattcttcgcttctcgcgcgtttattttgtctgcgacttgttgcccacttaatgtaaccattggcatgccaccaccaggatttactgatccacctacaaagtacaagttttcaaaatactgactttctttaggaaatttaaatcctttgtttttctttttatctgctacaacaccatatattgcaccacgattagaacgataatttttttcaatatcctccggtgtccaaacatcttcataaataatgtgttttcttaaatcagtgagtcccattttttctaatttatccaaaattttatccctaaacttcgtataatcttcagttgtaaaaggctgatcttgaatatatggaatatgtggtaagactttgatattttcataacctactggagcttgtgtgtgatcagttttattcgtatttactagataaatggtcggatcatctggcaataccttttcatgaaaaacttgttgataattgagataagcattttccgtaaaaaagaaattatgatgtgctaattgcgggtattggcaagcaatacctaaatgcatcacatatcctgagcttgctggctcaaattcccgctctaatttgtttaatcgttgagtaccaaggtgaagtaaatatttataagtaggtatgacttccatatttgaaataatataatctgcctttacaaactcacctgtatctaatctgacacctgtcacacgtctttgatatgttttaatattgtccacacgtgtacctgtatgaattgtgacaccttcttcacgcgctagcttttccaaggcattggctaaatgatggattccaccttctacataccaaaggccttgctcttgttgcatatggaataacatagataatacagctggcgcatcgtatgatgaagaacctacatatttgataaaatagcctaacatttgtcgcaaatatggattcgagatacgcttgtctatggcctgttgcatagtatgtacataatcataattaataagtgcatttaatggcccatgaaatttaataatttgagatagtgtatctaaaccatagttaaaataccctttttcagtaatacgatcgattcgtcttgtataattcaaataattttgcagttcctctatatcctttttcgacaatatcgcattatgctgacctgtttctttaataccttcatacaaatcgatagtcgttccatctggaaaaaagctacgccattgatgtggcaatctcttgattgtaacgtagtctgacatttgcttcttgctatattcgaataatttttcaaaaatataaggcatcgttaaaatagatggacctaaatcaaagccaaagccatctgattcatgacgattcactttgcctcctatatgattattttgttcatataatgagaccgaatagccactttgcgccattcgaattgctgcagaaatcccacctaagccaccaccaataacgatgatatgtttagtcatgacgttcacctcttcgttttaatatgcgtagtaactgcgttaatctcggtcgattataacgttgcacaataatgataggaacattagctatcattgcatagaaaatatttatatactttactaaacgagggcctttattgaatatgatgaccggaagtatcgatatccaatgaattaactctgccctctttgtctctataatcattttttcaatttcatcagtattgattgtcattaaatgacgctgatcatatatattttgattaagctgatgaccatctaaaatcttatgtttccattttcttacgtaaaaccatttgttccaaaattttccatgcttctcaaagttaaataatttaaatattatatgcttctgacgaaaatacttgtcaggaattcttgtacctaaatttgctatatttagttgaacaattaaccaatacatactacagaaaaatgctgttttgatatattttttcatggttttcatctaaattgaatcactctcaatcatactgacatagtataaattatcattttattacttagttccctaaagatcagtgaataaaccgctctcatttatatttatataaaacaaaaacgccaatactctcatgttagagaatattgacgtcatttgatttacatttgattaatgaatgaaattatatgaacctgcttggtttgctgaaattgtacgagatgtaaccacaccagcaccatgtccataattcatttctgaaacacgaacagaaccgttgctgttaacgccttcaacgtaagcaacatgaccgtaatagccttgtgttgtttgcatgatagcaccagcttttggtgtattgttcactgtatagccagatgatgcagctgcgctagcccaattacttgcgttaccccatgttgaaccaattttcccaccaacacgatcaaatacataataagtacattgtcctgaagtatataagttacttcctgatgcatatccattagaaattgaacgaccatttgaagatggcgctgcagttgtagtcacatgaacattattgcttgttgtgctataacttgcacctgaaccaccagtgtaatagttatttgttgctgttcggctattgtttgtatagttattgtattgatatgaatgattatagtagttattgtaagatgcattgttataactataagtattgtagttgttgtaatagtatgtgttgttttgcgttaattgacttggattcaaatttcctgtccaagtgtaatgataattaccttgtgcatcaattgtatacgtatagctgtatgattgagcgtcattagaattatatccattgttattttgttctgcggcttgtgcatcatgtcctgcaaatgcgatagtggcaagtcctgctgtagcgattgtagctgtaacgatttttttcataattaaatatcctcccaataatcaaaacactctatacatatagtcattagcgactcaattattttaaattttatattttttatctttttagtatgcaaataattataacttttatagttttgcgacaaaacaaactataacagagattaggtaccttgtggactttgttatcataatgtaatctgttcctaacaaagcatcattgaatgtaatataccaattagaatgtttacaacactttttctgcaccgttaacatgggatttgaaaataaaaaagcactaaacttttaatgaaatacatccttttttgataataaatatcagaagtaatgtaatatttcaaaagtttagtgcatcaagttatttcttatttgtagcatgtgtttccattgtttttacaatcaaatcagtcaatgctttactacctgcatattctaaatgtatgccgtcataagcaaagtactctggatgaccttcagaagctttataccaatctacaaggtgtacattaggacgcttttcagctgcctcataaattaatttatttattctaccttcataatctctaggtactctaatagaaactaaatatatgtctgcttttccaaaactatccaatagttcatttaattgatctttcgtaaatgccccatttgtaccaagctctactacaactttttgaccttttttagcatagtctttatattgcgatttcacaattggtgtagcatcaacgagttgccgtccaactttaccatcaatttgtgcatttggtattttcttagtaaagacattaccaatatccaccataaccgaatcaccaattaataacggtgatgactttttaatatcctctttactattcgctgtctgcttatcctcttgcttatcttttttaacgacttttttcttcgttgttttaaattcaatcttcttctctttcttctcagcttcatgttgtttaccaagtgcatcaaattgcccactgagcacgatgatagatggaatcaataataagataactaacgcagttctagcaaattgactcttctttttaggtaaaaatgcaaaagctttaaatccttttttacgtataggtgtttcaataaagcgatacgaaatttcagccattaacgctgttaacaaaatttctataatataaacgtataccggtatttgtccttgtacgtaataactgttcacaaaaacaatgataggataatgccataaatataagctatatgatcgtttacctataattagcaaaggtttcatacttaaaaatttagcaaataaactagaaggatgtaccgcaatcgcaataatgaataaagttgcaaatgatataatgtaaaatcctccattatatatccattgatcttggtctccaactataaagaacaaagtcattagcaccgcaaaaccagatatccctataatatctaatgatacgacaatctttttagaaatatcttttttcaaagcaaacggtggccaaataaatgctaatatacaaccaagcaataaagtttgcagtcgtgtatctgtcccaaaatacacacgtgaattatctccagtgataaaatgaatcactatcataagtcctaaagaaatcaacgatacaataaatagcgtttgaataatatttctcggtttaaatctatgtaataagaacgtgataaccaatgggaaaagcaagtaaaattgttcttcaatggctaaagaccataaatgtttgagtggttcaatagcaaattggttaaaataatctacattctgtgaaatgtaccaccagtttgaaacatagaatatagctgcaatagcatctcgtttcatttgtataatcaattccggtttaaatatcagtgtgaacgtaagcacgacacagattaaaaataacactgccggaatgagtcgtttcaatcgtcgcttccaaaactctagcaaatcgattttttgcgtccgataatactcacttatcaacaaacttgttattaaataacctgaaataacgaagaatgtatctactcctaaaaagcccccacttaaccattgtgcattcaagtgataaataatgattcctataactgcgaatgccctcaatccatctaatccgggtaagtatcgcggggaatacattttttctaaacgtttaaagtcttttgtatccatgttaataaacgccccatttatttttctctattttgtagcatatcacaatatttttgaaaataaaatattgcaatgattttcattaattgatttaacccttaattaagatagttttaaattttttattaagtagaaaacaattattacagttaatttcattactgcaaaccacatataaatttgtcgattttactacataacatagattatcatagattcttgaatttttagcaaaataactgttattttcattatatttttacaaaaaaaggttcgttttatattttatgcatcttactgtaacagaatcattaagatatgctgttcgaatttacttttaaaaagttgaataaactgatatgtattgaaaataaagtgaaatgcagcctatcctctaatttaaaccaaacgatatatcacgtcagcctttatatttaaacgctatgtgtcacttttaaaatgaatattactaagattgtcatatcaattattcattgcatcgaattaatcttttaaatttctataataaaacctattatctacatctaatttaggaaaactacttggtaaatctcctcgcttaatttcacggaagccattattagaataaaaatactgtgcactaataaatttatcaattgttcctaaataaataccatcgatattttattctttacatgtcattataactttatctaaaagttttttacctatttttaaattcctataaccttcatcaacaaacatttttttaagtgcagacatattattatctagtctaatcaaacctatagtaccaacaatattttgatgattgtttattgcaagccaaaattgacctccgctattcaaataattatgttcgatgttttccaaatcaggttgatcattcctatcaatatttatattaaattcatttttttgaatcgataaaataaatttgattaactcttccttataagacctattatattcaattatgtttatagccatttttatctcctttttcatttaatttaatcataaaatgcgcgtttagtttgtatctagtgtactcagtacatcctcaaatgaagcttcattccacttggcacttaataaagacaagtattttagcagtaatacaataaagtccaataaatttccctaacttcaatatccactttttaagaaatgtatttttaattaataaaaaaactcttcccaatttctatgggaagagctatatatttaatgtctaaacattacttttattaattatgaaggaattagaatccccaagcgcttaaaccttgtgctttgtatgctttaacagctgcgttgatttgttggtcaacagtgtttgttggaccccaacctggcatagtttggaataaacctgaagcacctgatgggttgtaagcatttacttgaccatttgattcacgagcgatgattgcagcccatgtagaagctgaaacaccagtacgttgagccatgatttgagctgctgatgaaccagtagcacctgcagtattaccattgcttaatctcactgaacttgaagtagttgaagtgctgtagttatggtaagttggagctgaaacagcttcaacgtttgaattacttgattgtgcattgtagcttactgattgtacatttgaaccttggttgtatgaagtagtgtagtctgcacctgcaacgtttgagaaaccagcagtttgaccattagctgcttcatagctccatgaccatgtagtaccatttgaagtgaagttatattggaaaccatcttttacaaagtggatgtcatatgcaccatctttgattggagctgcatttaattgatcttggtgattgtgtgctaagtcaactaagtgtgcttgatcaacgttcatttcagcagcgtgtgcttcatgtcctgtgcttgctgcgtaacctgttacacctaatgccactgctaatgatgatgccataattgtctttttcatagtaaaaaatcctccagtaataattgtaagtttatgtttttagtaattatattttgaatttgaaatgtcgtagtgcaagtttaaattgtcttttatttctttcaacggtaatcactatatcacaaaaaaccagccagtaaattacactttctttacaaaacattacaatatcaagttttatttgtaatgttgaaatatggctgttttatactgtaatgtgaaatatgtgccttttagaatccaatcaacccttgaaatagtctttaaagcataagatttttactatgtttaggtcaactattacaactttcgtaatattacagattgtatttttgttacatagctgtaatatatctgacatgtaacttctcttattttcgtacattaaacgcaattaaaaagcaatcaacacatatggttccgcaaatgtgttgattgctattattgttatatattcaaagttactatgcacacatcttttgtgaattgtcttatcttttataagcacaaataaactgcagctcaattatattgttaaactttattccctcaattcacaataacattaaataatttttggtctcatattttcaaaaaacatactgtccttatcccatgaatttaaaaatatcattagtatataaacgaaacactttacgataaatgatatctgcaagccaagctgttacaaatggtacaacaaagaacgctactacaattagtaagacactcaaccaagcagaatcaacctccataaatttaaatgcattaatcggtcctaccatccctataaaaccaaatccagctgactctttcgttccatgaatacctactaatgctgataccaaacctgatacaatggctgtcgtcaatattggtaacataagaattggatatttcaccatattaggtatcatcattttaacgcctccaaagaagacggataacggcacccctaaacgattcactttacttgtaccaattatcaatactgcttcagtcgcggagataccaattgacgctgatccagctgctaaacctgtaatacctatcgcaaaggcaatggccacagttgatagtggcgaaataataataagactaaataccattgaaatcaaaatactcatgacaattggttgtaattctgtaaaaccattaaccatattaccgatggctgttgtaatcattttcgtatacggcaatattaaaacaccaattgcacctgaaataccgccaacaactgttgggaatacaatcaatgccatactacctacgcgatgttgaataagtaaaatgaacaacactgcaatcgctgctgtaatcattgtattaattaaatcaccaatacccgtaatcatccaagcaccatttttaaactgcgctgcaccgcttcctacatatgctgcacttgccacaacagcaattgctaatggcgataggtcaaatttcatggcaaccaatgcaccaatcaaagcaggtactgtaaattgaattgcaacgacaacgcctaataacgttttaaaaatcggatgataatccataaagtatttaaaaatttctccaagtatcgcattaggaactaaacccgcaacaatacctatggcgacacctgataaaactctaaatataaaatctttgggtgtaattgttttaattgatgtcataatatcatccttccatttatgtatatacatctttatgcaaataataaagagccttaagttataagctgccactagcttaaattctaagatgtgcatgccgatgttgttatatttaggctagcagtatcatctataactcaagactatgaaaaatagtatatcacaaaattctgaatttttagataaagaaattggcaatttttcaaacatattgttacaatacacttttattttatcttcatttttaaaatccattaatataatagaagaaagacattcaaatgcttaccaaaaaggtacattatttgttaggagcgtatcagcacttacatatcatcaacacaattgacaatataatagaagatactgataataagtgttaaaacaacagatgttaggtagtgaacaaatgatggaaagtaaatccatagatccaagaatcgttagaaccaaacaattgcttgtcgatgcttttcttaaaatttctagagaaaagaaattatctcaaattacagttaaagatatcactgatattgctacgctaaatcgtgcaacattttacgctcatttcactgataaagaagacctcctagactacacattgtctgtaaccattttaaaagacttgaatgataacttgagcatttctagtgtcattaatgaaaaggtactgcgtaatattttcatttcaattgcgagttatatcaaagatgctgcaaagtcttgcgaattaaatagtgaagcattttgtaacaaagcacatcaacgtattaataatgaattagaagatatttttgcgattatgttagaaaacagctacccagagcatcaacgagatatcattgtaaatagtgggagttttttagcagctggtatatcaggcttagcattacattggtttaacacgagccaagagacagccgatgtgtttatcgatcgcaaccttccatttttaattcatcatatagcacatttttaattaaacttggtatttagtcatgcatctagaaatcactatgtgacttaggttcatacttgtacacacaataaaatttaacgtattacgattgattagccgtgtctaggacataaatcaacgtcctatactctacaatgtcatattggcagtcgttaactgaatgaaaataagcttgtcattaaaacatatagattttagtgacaagcatttttgtttttgcgtacttaaacaacacttcaggcaatatgttgtttaggcaacaaatgatatgtgcgtgtttattggcaaacgtacgacatagtagtatagtatgtctaaacaacacatgtcgcatagttgatatgcgttgtttaaatactaagataggagggattgacgtgagcgagacagatgaacctcaggggtttgaacacacgcataatatattaaatattaatcagaatagtaagagtctaatgacattcattacaagtaaattgaagtcgaagttgaagcaacacataataattgctcgtggtaaaaagcgaatcgactatcgactgtcgtataacttttacactacgtattatgataatgtagaaatcaagaaaatcgactgtgaatatacctatgctatgcccattgcaattttaataagacacacgatgtcattcgacaatgctcgtttctttgctcagttacgtcatcctgtcttataaaacaacattgcagacatgtatatcaaacgacacttcaataacatcactttgccatcgtactactattaaaatcgtgtctcaaaccccttattctaattccaaaaatctgctggtcaaaagaccgagaaactaaaaacattactgaatatgttgataaattaccttatagaaataatctcaaaatatatcaacacttgattctaaggaggatatgacaatatgaaaattttagatagaattaatgaacttgcaaataaagaaaaagtacaaccacttactgtagctgaaaaacaagaacaacatgcattgcgccaagactacttaagcatgatccgaggacaagtattaacaacattttccacaataaaagtggttgatccaatcggtcaagatgtcacaccagataaagtttatgatcttcgccaacaatacggttatattcaaaattaatatttactcacgaggtattgcacttaaggtgccaactgacctcataaacaaagcccatactgattgaagacactaatgtgtcgcaccacgtctcttacgacatgtgcacattacgctccatctctgtatgggctttttatttattcttttgagaatttcattttagcagactaaaaaattaaaatggtgtccatcaagatctttgaacattgcaccataaaacccttggcttactgttggttcttgaactactgtgccacccgcttctttcactttattcaccaactggtcaacttcttcatttgtattcacacctaaagaaatcatcacttcatttggttcagtattaaggctttgctgacttacattttgaaaatgcttgttttctattaaaattacggttgtttgacctatttgaatgccgaccattttatctaacatttgtgggtttctatttattttaaatcctaacgctttataaaactgtgcgctcttttctaaatcttgcacatgtaaattaaaccacattgattgaatcatgattgcaccccattcattacttattatagtcttggactttaagccaatcacttaatgataatcttgttggatttatttcagccattaattcaaagtctacttcataacctttttcttccaaccattgcttttctgcaacaccactaacaaattctccttctataacagtcgatttacctgtcacttcactaaaaattgttgctgcttcacttaatgtaacttcatcggaaccaatctctattgattgatgcgtaaagctttgtggatgtgcaaaaatatacgatgcaattttagctatatcaatagaagaaatcattgtgaattttatattcggattaataaattctggtaatgtaatacgttcatcttcgactttagcaatgcgtaaaaaattatccataaagaatgatggtttgataattgttgcatttatattagattccattaatctattttctatttttgctagtacttcaaagtgtgggccagttcgatttcgattaacccctcccgcagtactatacacaatatgttgaatattttcttgctcagctatttcaattatcttcataccttgtcttaattcttcgttaacatcatctttaacgattggctgaatactgtataagccatacttccctttcatcgctgattgcaaactaacattatcactcagatcaccttcaacgattgataaatgcggatgtcctatgtctgaaagtttacgattattcttatttctagttaatgcacttacataccatccatcctctaacaactgttttacaactgcattaccttgcttccctgttgcgcctattactaaaatatctttcattttagatccactccccttttatcttaaaaaccaatagtcctctttttcaccttttaaatacgtatatggttctggtgtttgtccatttcctttaatattgtcgtttattacatctctgacatcccatactaaatgaataaatcgttgtaattgatgactaaaaatgcctagtggcgctgtcatagctaatactttttccacatcttctgtagtgacattcagtttttcagcaatcatttgaaccgataaggtagattcttcaaaatgtgcttgcaattcttcagctgtgatgcgtctttgctctttatttaaagacattatcaatactcttttcttttatgatatttaatagttattgcaaattcattgctaactttcttaacacgttttataataaacggagagttatccgtttgtcaattttagagaactataagtaggtggaacaatgcgaaaggatgccatagagaataggcaacgaattgaagaaatagcacacaaactttttgatgaagaaggcgttgaaaacattagtatgaaccgtattgctaaagaactaggtatcggtatggggacactatatcgacattttaaagataaaagcgatttatgctactacgtcatacaaagagaccttgatatttttatcactcagtttaaacaaattaaagatgactatcattctaattacgaggttatgcaagtgtcgttagattatcttttacaatttaaaatcgatcataaggcactactgcaaagtattgaagcaggcaacaataaattacgtttttaccaaagcgcattttatcaagaattatttgatttttattatgatttatttaaaagcgatgatgacattttcacaaagttcaaaactgatatgctattgcaatcattatcaactagtgtatttgccttccaaatagaacatcgccatatttcaattgaagcgtacagaaattatttattaaacatttatttagatgaggtggaacgtaatgactaaaattgtgttaatcacaggaggcaataaagggttaggctatgcaagtgcagaggcacttaaagcattgggttacaaagtttatataggttctcgtaatgacgtaagaggacaacaagcatcacaaaaattaggtgttcattatgtacagttagatgttacaagtgactactcagtcaaaaatgcttataacatgattgctgaaaaagaaggtcgtcttgatatcctcattaacaatgcaggtatatcaggtcaattttcagcaccttccaaattgacgcctcgtgacgttgaagaagtatatcaaacgaatgtatttggtatcgttcgaatgatgaacacattcgtccctctcttagaaaaatctgaacaacctgttgtcgtcaacgtatcaagtggtttaggttcatttggaatggttacaaaccccgaaacagctgaatctaaagtgaattcattagcttattgttcgtctaaatcggcagtaacaatgctaacattacaatacgctaaaggattaccaaacatgcaaatcaatgctgctgatccaggtgctacaaacactgatttagttggtgattttagtaataattcaaaacatgtttctgaaggaatcaagccaatcattcaattagcaacgattggtgtagatggcccaacaggtacatttattaatggcgatggagaaatgccttggtagatcaattttatgttacaaacattgaaattagaggtatataaaaaatgcttctgcaatagatgcaataaacatacaaattactttggaggcgaatcaaatgaaaagtatcacgtttgaagaacattatgtcattgaagatattcaaaaagaaacgatgaatgcgatatcagcagatcctaaaggtgtaccgatgaaagtaatattagaaggccttgaaaaaaagacaggttttacaaatgccgacgaattatcacatcatgatgaacgtatctaatttatgaataatcaagacgttcaaattcaagtcttatcttatggaaatgggtctccttcaaatttggttggtcagaaagccattgaattatgtcaaaaagcaaatgatcaattggcaaactatattgcacaatatcccaatcgctttgtaggctttgcaactttacctatcaatgagcctgaagccgcagcgcgagaattcgaacgttgcatcaatgatttaggattcaaaggtgcgctcattatgggacgtgcacaagatggttttcttgatcaagacaaatatgacattattttcaaaacagctgaaaatttagacgtaccgatttatctacatcccgcaccagttaacagtgacatttatcaatcatactataaaggaaattatcctgaagtaactgcggcaacatttgcttattttggttatggttggcacattgatgtcggtattcatgcaatacatctagtattatctggcatttttgatcgttatccaaagttaaatatgattattggacattggggtgagtttatccccttcttcttagaacgtatggatgaagctttattcgctgaacatttgaaccaccctgtaagctattactttaaaaataatttttatatcacaccgagtggcatgttaacgaagccacagtttgatttagtcaagaaagaagtaggtattgatagaattctttatgctgctgattatccatatattgagcctgaaaaattaggtgtgtttttagatgaactgggtttaacagatgaagaaaaagagaaaataagttatacaaatggtgctaaattattaggtttatcatctaacaattaacaaatggaggtcattgaatatggagactttagaattacaaggcgctaaattacgataccaccaagtcggacaaggacccgtgctcatctttattcctggtgcaaacggtaccggagacatttttctgcctcttgcagaacagttaaaagaccattttactgttgtagccgttgatcgtcgtgattatggagaaagcgagttaactgaaccactccctgattccgcttcaaatcctgacagtgattatcgtgtcaaacgcgacgcacaggacattgccgaacttgcaaagtcattaagtgatgaacctgtctatatattaggttcaagttcaggttcaatcgttgcgatgcatgtgttaaaagattaccctgaagtcgttaaaaagattgcatttcatgaaccaccaattaatacatttttaccagacagtacttattggaaagataaaaatgatgacattgtgcatcaaattttaacagaaggcttagaaaaaggcatgaaaacatttggtgaaacattaaatatcgcaccaattgatgcaaaaatgatgtctcaacctgctaatactgaaaaaggacgtatagaacagtacaaacgtacgatgttctggtcagaatttgaaattagacaatatacgcattcagatattactttggatgatttcacaaaatacagcgataaaatcaccctactaaatgggacagattctaaaggctccttcccacaagaggttaacttttatataaataaagaaactggcatacctattgtagatattccaggcggtcacttaggttatattcaaaaacctgaaggctttgctgacgtattattaaatatgtggggttaatctatcgttctctaataaaacagcttggacagttttcaaattatatttgatggctgaccaagcttatttttgtttacgtttaaacgttcaaatcaactcgttattatacatgaaagtatgttaaccattctcttccactgaaaacactactgttccaaacattgatagtcttcttttgaaatgccctttccgataagcaccaaatattctggcactttttttgaaaatgctacaggtgttaattcatattgtccttgtgtaaattgaatgagatacgtttgtgcggtgtcttcaaatgtcataaaccctttcaacctataaatatgagagggaaggcatgctaaacgttttataaactgtgctttagtacatttgactggtgattgcacaaattgatgattaatcatttgatgtaacgacttatgtttattgtcagaagttgctgtcatttgtctaactgttattggcaaagtgacgctgccatgcataccgacttgtatatctgcctctgggttaataacttctaaatctttcaatagtttgctcgtcgtttcaacatctgctgaatctattttattaacaaataagacagaacaatatgctaattgctcataaaataagccttggatgtctttagggaatgatttaatgtgtttatacatgcttgcgcctattacaccaatcatatgtgtaattgttgtaaacggagctaaaataggcgttaaacaagcatctaagacagagaccggttctgcaatcccactacattcaataaatacaatgtctggttgctcttttaaatataattgatgtaactgttctgatacatctgctttcattgcacaacagatacacccctctgtcagttcacttaaaggtatgtcttcagatactaaggcaccatcaacactcattttgccaaattcattcatgatgactgccggtttcagcgactcatttaatgatttagcgagcaaatgatttaaaacagtcgttttaccgccacctaaaaacccacctataataactattttcatctgcgactctcctcttatacttcatatgcatagaatattccaagatagctttcctattgactgacatgactctatattcagttatagttcatttcttttttaaataatcagcattactattttaacaatgatacctacaccaataactaaagacaatgatgtcaccatttgctttccaattaattttagtgctgactgaccacctaaatgcttcaaaagcatcgtcattgtgaccgagcacgctgtaaatgttgaactaaaaaacacaagtagtagtaactgtgttgctgtcattccttgtaataaggcgccctgatgcaaattaaacaagagcatgccgtcttttcgaatcattgaaaataaaatccctggtgacaattctgacgagatgcctaataacgataatataggtgtaaatatttgtgataaaacattcaaaattggcgttagtgataaaatactaacaataagacagattgtgataaaaataggtagcgcttgaacgataaacatttgtatattttgccacatttgtagcaacatttgacgtatatttggcacatgtaattgcctatcataaggtagcggaacgctaagttgttgatcattctttttcaaccatatcctattatgtaagatgccacctaaaagtactaatattaagtacggcataaatagccatgactttccagctacactaaaaatagataatgtcgcacctatttgataactacaagaactaccaaagcttattaaactcatacactgtgtcttcgtgcaggtatggcattggtgtgctgcttgtgaaatagctgctgcattacatccaaatccttctaatagtggcacgatatcattaccttgtaatcctatccgtatcattgaaggttcaattgcccatatcatccatgatttaagtcctgtttgatcaattacagcagttgataagctgatcaatattacgaccggcaatgcccatacgagcgaatatgttccaagtgatagcacaccataatcaccaaataatatatgctgtaatatatcttgattgagcaatgttgtttgagttaaatattctatccatgctgatacatactgattttgaaaccaatctgaaaattgataagcgataccgattggtaatgcgaacattaaaaatatcaacaaccaggctaaaaatgtctcacttattttaggtcttaaatgtcgtcgctcatgttgaaatagtgtcaattgttctatcacatgttcgctcgctataggcgaagaaactacactttctgccaatgaaatatctaatttctgttttatgattaataatcttaatttcgctttttctgttgcggtaagtttatccgcatgactaataaccaaataatgaggttcattaggtatgggcgtataatgccccgttctcatatcatatttcacttctaacatgtgcatgacacttcacaacatgaataatcatctaaatacatttgatttttttggtaattttcaatgacatcttgtttagctggtaagccttcccgctgtgttaaaagatgtgcaagtactgcaaatcgcgctctgaatttatagatatagcataatttggcattatcattttcaactgttgcaccaatcataaaaatattcggataacgtgtcgattcatcatgtgttgttaatttaatatcttgatttgttgtcgcaaataattgttgaacgattggattttttgttgcatcaaagccagttgctagtattggttcatgaggcgtatgcacactttgtccgctatcaaaactgatatgatactgtccgttgttaaaatcaatatctttaactgtataatgtacattcatttcaatgcgagcaccttgcttaatgacattacctagtcgctgacgtgtataaggtgacaatctaacactaggatcagcatccggatcatttaaaccggttgtgctagtataaagtgcgatgtcagagccattttttgcaagttgatatgcagcatcaaaaccactttcattacctccgataaccacatattgtcccttattaaagttatcaaagtcttcaatttcactataatgaataccatatttaaatggctttttagggaaattataatcacctgttgcgacaaagatataatccgcgtgatatgtctctgttgtcgttgcaatcgtataatatgcatcatctacagatatatttgtgacaactgtattttcaaaaatattcagctcgtaatggttggcaaccacttgtaaatattcagcatatgtttctccggaaatatgttcttcattaaatgtaaatgctggcgaagtatccatggaaattgcattcatatcaggcatgccaaatccattagacgtaaatgatggcgtaatcgtacgggtcgatttcggccaatgtttaaatgaatgtcctactgttcctttttctaaaataatgacatcttttataccgaaatcttttaaggtaatagccatacctatacctgcagcaccggcaccgataatagccactttatgatgttgcatattaacactccctcaatgatctatttcaagttattgtttttgattataaatcgtaataattacgatttataaagtatagacctatccttgagaaatttcaatattaaaagaaaaacttccgttattgtagagaattcatctacatttcggaagttggtatgtgtattttttattaaatttaaagatgctacggttagttcaaatgattgcgatagacattcaatggttgtcatccagcctcagtacttggagataacattttggcggtgagacataaatcatatttttacaaaatttatttcgtcgtcccaccacaataaagaaaaagtatttctttattgttgtgtaacttctccacgttgtatttcactatccaaattttgtttcatattatcaaacaactcttgaaatctaacctcatcttgatcagaataacctttaaaaataactgaatctatattttcctcgttaaaataataaatttcatcttccacaacaccaatcggatatttacatgcagaatagtcaaacatatacttttgattttcaatttctacaattggtcctctattaataatcattaacttttgtgaaccttcttttaaataaataatgcttcctattgtttccatttattttcctcctttgtcaccgtctcaatttcaacattccttcgcatttccaagtcaatcatctcttcttccgctttacgaatgccatgttgaatttgctgttgctgctcgtataacgcttccgttgaacgtcgtttcgcaaaatgaaattcatcacggaactgttccatacgactagccatattgctactataataacgctcacctaaatgttgatataattgatctatcgaatgattaagcgcatcactttcatctatcaatgctttaacctctcgcttttcatcatataagtcatccatttgcttatgtttcgctgtgattattttattgatttcatccagtttattcgacatcatttcaccacgttttaatttttaccaatttcattaccaatcattacgtcagtttgattaaattcttcgccaactttttgtatactatcgctcgcatttcgtattgcttcagcaacagattgattcttactaatcaaatcatctatcacactatgagcattattatttccacttactgttgtactttcatctttatccggtttcgacacattattacatgtttcaacagcgcttttaatagatgatgatgcactattggtcttaaaaatatcactttgaactgtactcatcatttacacctcttcccatttaaattattttaaaattattagaaactgtatcaatatatgatattcaaacattcaataatacttaaatattgttttgtgattatattcaaaattattgtatcaataaatatgtatcattcctagaatttcattgaacaaaaagttagaaaatcacttttattgtgactcaatcttgttttgcattatagaaattaacaatagagattaaaattttattttccaacaataaaaaagcacaaatatttttattgaggcatctgaaggccttctcattataaaaatatctgtgcatattattatctcaatctaacttaataactaacctgttgtttcttgtaaaatcttatccatagagtgcgcaacactatcacggtacatctccccaaatttcaataaatgcaccatcaataaatataaacgataaaattcaagtctataggatgcaccttttgcgagtggataatgtttattatacgcatcataaaattcgctcgtaaaaccaccaaataccgttgtaataccgatatcaaattctctgtcaccatataatggtgctggatcaaataacgccggacgaccatcttgtaagaacatataattaccaccccataggtcaccatgtaataaagacggtttactttgatgcttttctaattccgccacaatttgacgtcgcactttgtcatatactttgatatcgttggcatcccatagccctctatttagcaactcatctttcaaatggtccatgcgcttgtcgacaaaaatggtataccaatcgtcttgccaatgattatcaaaagaaatatcgccaccttcataaggtaatgagaagccaaatttgccttcttcttgttgctgactgtgtaattgagctacgagttgccctaattggcgttgactccctgaagacccttcttctaaatacgtcatcactaaatacgcatcaccgttaacctcgccacttgcaattactctaggtgccgtgatacctgcacgttcaaattcatttaaacctgcaatttctgcagcatagaatgattctttacgtccacgttgtacaagtaagaaaaatgtatccgtatccgtttcgactcgatatgcttcgtttacatcgccaccactcactggtgaaatctctttaatatcttttaaaggtaaatgctctaaccattgttcattcatacaaacaccttccattacgcttactttatactattatattgcctaattaggatgatttaatctcaattttatttatggtacttgcgtcaattttcaaaactttttagttttaactaggaaattatgtagggaaatgctagtctattaaaagaatatatttcacatatattaagttgaggatagtaagcctcaaatataatgaaataggagcatactcatgtacaaattaattaaacctttcttattcaaaatcgaacccgaaaaagcacacggactaactatcgatgcattaaaaacgttacaaaagtttccggttttattcccagtcgtcgataaactatttacttataagaatccaacgttatcacaaacgatacaaggtaatacgtacgacaatccaattggcttagcagctggtttcgacaaatcttgcgaagtaccaaaagcattggaacaccttggattcggtgctttagaattaggtggtatcacacctaaacctcaaccgggtaaccctcaaccacgcatgttcagattattagaagatgatgccttaataaatcgtatgggcttcaataatattggtatgaacaaagcactcagtcatttgcgtaaaaatgcttatcaagtgcctgttggtatcaatgttggtgtgaataaaatgacaccttatgaagcgcgttatcaagattatataaaagtcattgatacgtttaaacacgacgtttcatttttcacagtcaatatcagttctccaaatactgaaaaccttcaaaatttccatgataaagatgaattttcaatgttatgtcaagctttgacaacatttaaaaaacagcacgatgtaacagtgccaatttacttaaaactaacgtctgatatggatttcgatggcttaaaagcactattaccagcgattactgagacatttgacggtatcatcttagcaaacacaacgcgacaacgagatggtttaacttctgctaataaagtcgaagaaggcggtttgagtggtcgtccattatttgaacgtaatttaaaattgattaagtatgcttatcagcaaacaaatggtgaatttttaattataggtacaggcggcgtattcagtactgaagatgcaatcaaaatgatgcgtcacggtgcgtcacttattcaaatttattcatcacttgttattgaaggcccaggtttaactaagaaaatgaacaaaggcatcgcacgttacttaaaagatcatcattttgacaatgtcagtgatattataggactagatgcctaatccaacgtagtcaaataacactttaaaacttgctgaatcgtcttattaaaattatgatataactcaagaagatatatttatcaccatttttcaaaataatggcttaaatatcacatatcattaaatatagcgttttataacggaggcgtttgttatgactaaagaaacagataataaaaaaacagtagcgacttctgacaacaaagacacacagcaacaaaatcaacctgaagaagatgaacgtcaaggtttgaatggttatcgtaaaacagatcttgatttagaaatcgagcaagagctacgtgaaatgatgaaaacaggagaaaatgaaacgaaaaatgactacaaaaagtttaaagtgttttcacttatttcaacacttgttattgtcattttagcaattataagatttgttcataaaatgatgtaattagagtgagacattgttttatgtctcaggatccagttattcattatagctacaatatttacgattatataaataacccgagattttagtatgattcattccactaaaatctcgggtttctatttgataatttttaatagggcatggcttgtatatgcgcctgccttttatctcattaccaatgattaatctggatattgttctaaaaatgctttcgcttctttattaactgttttaaaatcaataccttgttgcatcgctgcaaagacacatccacaataacactgcctaaagatattatagtcattacacatttctatggaacgctcataacctttacttttcttaaaatcacttggcaaatagttcacatcgtatattttttggacatccataccaagttcattgattaattgcgcgttctttttaggtgataacgtgattgcactgccaaaataatcatagccatgttctacagctgctttcgctacaatatccaaacgcatttcaaaacaagcggtacaacgtaagccgccttctttttcatcagctaattctttatccttcaccattttcacaaacttatgcggttcataaggtgcttcaatatacttcacattcgcaccagtcttgcgattaaaatcttccacaaattgttcttgcactttagcacgtcgtaaatactcatttttcggatgaatatttgaattcgcgaaataaattgcaatgtctgcatattgtgttaaaaactctaatgtatatgtactacaaggtgcacaacaactatgcaataagattttaggtctgattgcttctctttcccactgcccgattaatttcttcaacaccttgtcataattaattttttgatttttcattttactgataataggttcagcattaatcatgatttaacctcccacatttaatcattaacttctattatatatgattcatattaaatgtcagtcaaaaaagttagaaattcattttaatgcatttatatttcgaaaaccccttatgtatctaaaagcattttttaaacttgaattttaaaacactaaacaacacatacgtctctgtgtcattttcattttttgtatgttatatatatatgtttactttatttaaatcaatttcaccttataatttatcgtgcattttacaaaagattgacttcaattcatcgtaaaagttatacttttgccattttttaatgtaacatggtgttagtaataaaaataatacattgaggtgttttacatgacagcattattcccttatatcgcttttgaaaattcaaaagaagcccttgcatattacgaagaagtatttggtgcaactgacgttaaacgtttagaagttggcgaagaacaagcgtcacattttggtatgactaaggaagaagcgcaagaagcaactatgcatgctgaatttgaagtgcttggcgtaaaagtgctatgttctgattcttttggtcgcgctgacaaaattaataatggcatatcattattaattgattatgatgttaacaataaggaagatgctgataaagttgaagcattctatgagcaaattaaagatcattcttcaattgaaatagaattaccgtttgctgaccaattctggggtggcaaaatgggcgtctttaccgataaatacggtgttcgttggatgttacatggtcaagactatactgcaatccaacaataatgttattgataaagatatcatttaataagcttatgttatatagcaaggcaagccactctcgattcatggcttgccttattttattgtatatttttaattatcgttgctggcccttgattgacaatcgtattaaaatgccttattaagtcaactttgtctatacggtttgaatcttctacccaatgtcttatcaaagacaatcccgcacctgaaacataactcatgaaataggaaaatggtataccattaatttgatcattttcatttttataacgttgtaaatgacacataattaaatcataaagtttttcgtggatatttgaatctttatccatacgaaacatcaattgataaaatgcgatgtctttttctatcatttctattaaaacggtcataatttgatgtatgttatccgtggataacttaactgctccatttaacttctcatcatgaatgaagtctcttatttcctccaactgctggtcctctaatttttcaagcaaatcatatttatcataataatgcgtataaaatgtactacggttaacatcagctaaatctgcaatttgttgcacagtaatctcttctaattggtgttgatgtaaaagttcaataaatgcatttctcattgcaacttgtgattttctaatacgtcgatctatagtcatttatatcaagtcctccccaatgattataaacaattataaacgttatgttcattatcccacaaatctccaagattgatgattggcacacaatgtttacctgtttaatataggtgatacaaacaaacagaaaaaggtgataacaatgaaccaacatttactaggaaatccaaaattaactgtcactcatgtcaatgaagtgaaagccggtattaaccacatcgttgtcgacagtgttcaatatggaaatcaagaaatgattatggaaaaagatgtcactgtggaaatgcgcgatggcgaaaaattatatattaatattttcagaccaaataaagatggcaaattccctgtagttatgtctgcagatacttatggtaaagataataagcctaaaatcaccaatatgggtcccctttggccaacattagaagccattccgacatctagttttacacctgaagaatcaccagacccaggattttgggtgccaaatgattatgttgtagttaaagttgcattacgcggtagtgacaaatcaaaaggcgtcttatctccatggtcaaaaagagaagcggaagattattacgaagtgattgaatgggcagcaaatcagtcatggagtaatggaaatatcgggacaaatggcgtttcttatcttgcggtgactcaatggtgggtcgcatcattaaatccaccacatttaaaagcaatgattccttgggaaggcttaaatgatatgtatagagaagtaacctttcacggaggtataccggatactggcttttatcgtttctggactcaaggtatttttgcgagatggacagataatccaaatatcgaagatttgattcaagcacaacaagaacaccctctgttcgatgatttttggaaacagcgtcaagtgccattatcacaaattaaaacacctctactaacatgtgctagttggtctacacaaggtttgcacaaccgtggctcttttgaaggatttaaacaagctgcatctgaagaaaaatggctatatgtgcatggacgtaaagagtgggaaagttactacgctagagaaaatctcgaacgccaaaaatcattctttgatttttaccttaaagaagaaaataacgattggaaagatacgcctcatgtcatatatgaagttagagatcaattttataaaggcgaattcaaatcagcgtcagcgttccctttacctaacacagaatatacaccattgtatttgaatgctgaaaatcacacattgaatcatgcaaagattagtagcgcgcatgtcgcacaatatgactctgaagataaacgacaagatgtaagttttaaatatacgtttgacaaagatactgagttagttggaaacatgaacttaaaactatgggtaagcactacagactcagacgatatggatttatttgcaggtattaaaaagttagatcgtcgtggtaatgaagttaacttccctgattttaatcatattgaaaatggtcaagtagctactggttggttacgcgtatcacatcgtgaattagatcaagaaaaatccacaattgcgcaaccttggcataaacatgaaacagaattaaagttgtcacaagatgagattgtacctgttgaaattgaattgttaccttcaggcacgctatttaaacaaggcgaaacattggaagttgttgtaaaaggtagtgaaattgtaattggtaatagtacccctggcatgaaaacacgttatgaacatgaagaaaccgtaaataaaggcatgcacatgatttatactggtggtaaatatgattcacaattaatcattcctatcgttaattgatatgcagcaattacggtcgattttgattaaaagtgacatagtgataggactgtataacaagagaaggccacacgcttggaatcttaaaccaaggtgtggccctttttattattgatagctatttaattttataaatcttgtcactaaacttactacaagcaatattaaaccaataaataaagccataattgctgtattactttcgttgtttactcctgtttttggtaattctttcaattgttgcttatgtactgacttgctcttgctatccaaatgaatactttgttgtttagccatttgtttattactttttgtgtgaatatcatttgctttaatacttggatttacagcactattattcgttgttccatttgcgtttttcaactgattaataacatttggatctttcgtgccatctattaaattatctggatgttttagtaaatgtctgcagtcggatactattttagaatcttttgcctttaccgcattattcggcacctcattatcatctttcaactgcttgataacatctggatctttcgtgccatctattaaattatcaagttttttcacacgtgctatgtcactaactggccctggataatttgcatccggttgtctaactggtattaaattgctgttttcattcacaccttcaggtttgttattttcggcgttcgcattatccgtaaaaatcaacactgataaaattgcaacaaataaacttataacttttttcatcttattcatcctttcctattttactaccttaatatcattgctattaaagtaacccatccatctatttttttcgtcgtataaagagtaatatttatacccatttggaatattgtaatagagtttagctgtgtacgctttatcttttttaattaatttattatcacccttttttgtaatttcaatgtttttccaatatatatacttacttttaattactttcactttcttattatatggatgacttctgtacttacctatccaataatttatgtaatctaattttaaatcatttattctcacgcctgaattatgattatatctgccgtatgcatgtactccgatgatattgttttttgaatctcttatcgcactaccactttgtcctgaaaatgtatctactgtataatacatttcattctcatcaaaactttctaatttccctttacctttatattgtctgttgtctgacttgtctcctggaaatccagaaatttcaatattttcacctttgctaatgcgtgtgttcaaagttaagtaacctgttttatttcctaaattattatttaacttaataattgctatatcttcttttgtaggagcattattaatccaagatttagatacaaaaaacttatgcgaaaaggcctttcctattgtatatgtttgcccatatactccagcatagacatcaatctttttagcccaacccttatcgtctttagaatagacattatgagccgctgtcaatacaatgtccttaccaatcatagtaccggtgcctttatatacacggttatttgaaaacgtcatatttaataatacagtctgcttataaggtctttgtaaaatattattaacaacaattctttgatctttaccgaaaactcgctcagttaagggcgtactataatcacctacttcataaagctcattttgattacgttcaattgttcctgattcaaaattattatcactaccattttctgaattgacgataggattattatcagctaagacaaaactttcaccataataactagaaacaattactactaacaaaatcaaaaatgatattttaaaaatttttgtcataggcattcctcctttaatctatattatttttatctatttcatataattttattatataatttctatcaattcaatatttttacttcacgaaactaaacaacatgtcattaacttatctcgttaagttaagaattctattttctaccaaataaattctgaatactgttttagataatcaattcgcaaaactatttctttataaatatgaccatcattaaacactgctaaaattgtaacaataatacatatgattttcttacgctaacccaattggcataaaaataaaaacccctaatggataactacattgttatctactagaggtttctaacttatactattttataacactatcgtattttctttttcatgaatcatttcaataatgacattgtcttcattcattactgctactttaggtgcatggtgtttaatttcttcttcattcaactgtgcataagtcatgattatgactacatcgcctacttcaacaagtcttgatgctgcaccgtttaaacaaattttaccactacctctttcaccagctattacgtatgtttcaaaacgtgcaccattattattattcacgatggctactttttcatttggcaagatgtctaccgcttccaatatatctgaatcaatcgtaatgctacctacataatttaaatttgactcagtcactcttgctctatgaattttagcattcatcattgttcttatcactttattcagctccaattattatattatctattaaacgcgcttttgaaaatttgacagctaacgagataaatatgcgtccagttatttcatgttgttctactaattgaggataactataaacagcaacttcttcaatgcgtccacttatatgtgattcaagatattgagtaaccctgtctataattactttactttgacgttcaccgtcttgatacaacgcttgtgctaatagcaaacttttacttaaatgtaccgcttcttgtcgttcttgctccgttaaataaacatttcttgaacttttcgccaaaccatctgcttctcgaacgatatcaataccaataatttcaacggcatgattgaagtcttttaccatttgctcgacaatagccaattgctgggcatcttttttaccaaaataagcataatccggcataacaatattaaatagcttattaactactgttaccaccccatcaaaatgccctggacgcttcgctccttctaacacatcagctaatggacctactttgacatcaatacctaattcacctggatacatatcttctactgcaggatgaaaaacaatgtccgcccctacttctgatactaattctaaatctttatcaatttgtctcggataagcatcgaaatcttcgtttggaccaaattgtaatggattaacaaatacactcacaactgtaatatcatttgtactaactgattcgcgtaccatcgttaaatgtccatcatgtaaggcacccattgttgggataaaaccaatcgttgttcctgagcgtttggctgctttaacaatgtgttgcatctcttttaccgtagtaatcagcttagtcattgttattaacctcattcataattttctttttatacgtatattcttctgatggaaatgcaccagatttaacttcttgatcgtattgctttaaaccatccacaccaacactaaaatcagcaaattgcttcacaaatttcgctttatgttcaacaccataatttaacatatcgtgataaaccaatacttgaccatctgtaccttttcctgcaccaataccaatgactggaattgttaagtgcttgctaatttcctctgctaaatcatttggaattgcttcaagtactaacgcaactgcaccagcttgttctacatttttcgcatctaaaataagttgctccgctgcttctttcgttgcaccttgtaatttataccccataacgccaacactttgaggtgttaatcctaaatgtgcaacaacaggaataccaattgccgttgctttttcaataaatggtgtaatatgcgctccttctgctttaattgcatttgcattcgtctcctgataaagctttagagcatgatttaagtcttgtgtcatagagatgcctactgcaccaatcggcatatcaacaactacaaatgtatttggtgcgcctcttcttactgcacgaccgtgatgaatcatatctgctaacgtcacttgtacggtactttcataacctaatacagtcataccaagtgaatccccaacaagaatcatatcaatacccgctgcttccacttgtttagcacttggaaaatcataagctgttaccatagaaattttagtttgcttttgtttcatatctattaattgacttactgttttcaatgttattcaacctctttttgcagtattattagaaatagtataatgaatcttttatagaaaggaaagaagaagatgttatcagttgcgattatcggcccaggcgctgtcggtacaactattgcctatgaattacaacaatcattgcctcatacaacgcttatcgggagacacgccaaaacaataacatattatactgtaccacatgcacctgcacaagatattgttgtgaaagattatgaagatgtcacaaacacatttgatgttattattattgcagtcaaaacacatcaacttgatgcagttattcctcatttaactcatcttgcacatgaggacacgctcatcattttagcccaaaatggttatggtcaactcgaacatattccatttaaaaacgtattccaagcagttgtctatataagtggtcaaaagaaaggcgatgttgttacgcacttcagagattatcaattacgtatacaagataatgcattaactcgacaatttagagatttggtccaagacagtcaaatcgacattgtattagaagcaaatattcagcaagctatttggtataaattgttagttaacttgggcattaattctatcacagcactcggtagacagacagttgcaatcatgcataatcctgaaatacgtacactgtgtagacagctattactagatggttgtcgtgttgcacaggcagaggggttaaacttttcagaacaaactgtcgatactattatgactatatatcaaggttatcccaacgaaatgggaacgagcatgtattacgacattgtgcatcagcaacctcttgaagtcgaagcgattcaaggctttatttatcgacgtgcacgtgaacacaatcttgacaccccatatcttgatactatttatagctttttacgcgcttatcaacaaaatatgtaagcacatatataatataaaaagaccttaacgatgcatttagaaccacctgttcctaatatcgctaaggtcttttaattatattagactattcagcttctctaatttcttctgccacatctttatagtctattttcgctttaacaaacgtctcgttatttaccgggaaatgttgttggaatgtttcaaagttttgtatctcaacgacaacgtcatccacttcaaagtcaagaacatgtccaccataagctctttcatcatccgcaaaatgtatatgaaaaccagcagaccctacgccatgaaataattctggtgtaaaaaatccaacaatggcaccacgaatatcttgtcttttttcctcaggttgtctgcgtgctgaatcaatcaaacgtgtatatggcggttgctgagcaggcatcattcgtacatgcatatgtttaaatgtgccataaattttaacagccgaaaataaattctcacttaacatttcatttttaatttgtgcgaatacatcatcttgtgataattgttgcaatggaaatgtcttactcgctttaaaattagtaatcgatgcatacggtactttctcatcgccttttaattctataaattctttatgctcgttagcatgatatgccttcccgtctaaaaatattacttcgccatcagaccctgttaacgttgcaatccctaaattcccatgttctaacaattcattaattgtagctgttccttctagtaagccagccattaacgtacctaatgtaccatgttgatacaagacattcgtcattccaaaaccatctccctatagttattcctcgttgtcatgctctacttcgtgattaatgcagaactactttcctttatactcaatgacgcctcgacatttctattcatgtcactaaattttcacgagtcataatattttattcaattattattttacgcaaaagtattgcctctatcaatgcttgctaaaaaaatgaacctatcagtgccacatgttactgcaacactaatagatcctcttacaattaatacatttctaattaatacttaaaataggcttagtcttctaataaatatttaattgaatcaaatgtatcttctaatgttttaacagatttatcgaacaatgcttgttcttctgcacttaatggcatttcataaattttaactgcgccatgttggttaactaatgttggtacacctaggtaaacgcctttgtgaccaccatattgaccatctaattgtatagaaacatttaagacattattttcattatttaaaatggcttttgaaatgcgcatcaatgctaatgcaataccatagtatgttgaccctttagcttggataatttcataagcagcgtcacgtgtatttacataaatttcttccgctttagcttcgctaccagtttgttcttttaatgtgtcatatactgaaatacctgctacatttgcttgtgaccaaactgcaagttcagtatcaccatgctcaccaataatactagcgtcaacacttgaaggtgcaacaccaagttcttggctaattaaatattgtaaacgtgcactgtccaatacagtacctgaaccgataacacgctctgctggtaatccagtatattcttttacaaatcttgttaaaatgtctacagggtttgccgcgattaagaaatatccatcaaagccactatccataacactcttaacgatgctcttcataatcttagtatttttttcaactaattgtaaacgtgtttcacctggcttttgaggtgcaccagctgtaataacaactaaatctgcatctttacagtcttcgtattcacctgctttcacatcaactggtgaaggactgtggactgtaccatggtttaaatcttgaacatctgcttttactttgtcttttgcaatgtcaataattacaaattcatcagcaacaccttgcgtaaccattgcaaaggcatagcttgatcctacagatccatctccgattaatacaacctttttaccaaatgttttcataattatgtctcctaacctaattgaatttattttacacgtgactacacgtaaaaatatctatactgaaattaaagattaacaattttattttattataatattatgctaccaaattacaaacataaaactgagatgtaagcggagtcaaattacactctaacgccaataaatattgatatctcaagctttagcacgtaatttgaaatttgtgacaatttttagcattctaaaattgcgtaatgacgctatttaaagcctttaacaaactattgagctttctatttttttcattttaaaaaggatggctattcgacttaaatgacttactatataacctcctattttccgccttaccctcatcatatttgatgcatctttttatagtcaaagaattacatttcatacaaactagccaatcagacataaacatgaaattgattttaaaaatataatgtgcaaaattgttagaaaattagcaaaaaatagtacttattcatttaatatctgttataatcagttttatcatttaaaaaatctatggatgttatcaagacaagtcattaatacgtaacataaagttgtgatttttcagaatttttagacaaaatattgattatttgtgctatgatataacatattaaaaaacaccgtatagaattgtttatgaatgtttgggaggaaagtttatgggaagttttttcaataaaatagcacgaaaagaggatccggctatctatcaaaataaagatggtcatttaaagcgtacacttcgggtgcgtgatttcttagctttaggtgtaggaacaattgtatcgacatctatctttacgctacctggcattgttgctgcagaacatgcaggaccggccgttgcgttatcattcttactcgctgctattgttgctggtttagttgcatttacttatgcagaaatggctgccgctatgccatttgcaggttcagcctattcttgggtcaatgtattatttggtgaattttttggatgggttgccggttgggctctattagctgaatattttatcgccgtagcctttgttgcatcaggattctcagcgaatttacgcggacttgtgaaaccaattggcatcgaattaccagcagcattatcaaatccatttggtacgaatggcggttttatcgatattattgctgctatcgttattttattaactgcattattactatcacgtggtatgtcagaagcagcacgtatggaaaacattttagttattttaaaagtattagctattattttatttgtaatcgtaggtttaacagcaataaatgttagtaactatgtgccatttattccagaacacaaagtaactgctacaggtgactttggtggatggcaaggcatatatgctggtgtttcaatgattttcttagcgtatatcggtttcgattctatcgcagcaaactcagcagaagcacttgaccctcaaaagacaatgcctagaggtattcttggttctttaagtattgctatcgtattatttattgctgtagcacttgtgttagttggtatgttccattactcacaatacgcaaacaatgctgaacctgttggttgggctttacgtcaaagtggtcatggtgttgtagcagctattgttcaagctatctctgttatcggtatgtttacagcattaattggtatgatgttagcaggctcacgtttactttattcatttggacgtgacggcttattaccttcatggttaagccacttaaacgacaaacatttacctaatcgtgcactagttatacttactattattggtgttttaattggttctatgttcccattcgcatttttagcacaattaatttcagccggtacacttgttgcatttatgttcgtttcattagcaatgtatcgcttgagaaagcgtgaaggtaaagatttaccaattcctgcgtttaaattacctttatatcctgtgttaccagcagttacatttgttttagtattgctagtattctggggattaggattcgaagcgaaattatacactttaatttggtttattgttggtatcattctatatttaagttatggacttagacattctaagaaaaatgacgtagctgaataccacccaccaaaataaaaatcaaaaaatcatttcccatctgattaacatccagatgtggaaatgattttttattttatattaagataatcgctattaccaaccttgtccagatatgtcatattgatctaagttacctgcttccaaagcagtcagtgcatcttctatagtgtttaacgccgtgtctaattgctcatatgttattaccaatggcggttggaatcgtaacacatttccagctacagctataataactacgccatgctcaaagcagtaattacatattttaagtgccgcaatagcatcacgtgttttgaggtttttgtcagaaacaatatcaataccaatactcagacctttacctctaacatcgcctacactattgtatttagatacccattgatccattcgtttcctaacatattcccctttttccgcactagcctgaagaagcgactgatcttcaatcatttgaattgtggctaatgcagcttcacaactaactggattagcacctgttgtaaataaatgtgctggtgcttctaaacaattcataatctctttgcgtccaacaattgctgacataggcataccacctgctaaggattttccaaaagtgattaaatcaggcgtaaaattaaaatgcgagactgaactccatgtacctgttctcccaaaaccttgttgaatatcatcgacagcgattaaaataccatgttcacgacaaatcttttctaacgcttcaaaataccctggaactggttctaaaagtccaccatcgccttgtatcgtttcaataacaatacatgctacttcgtcagcaggtacatatttcgcaaacatttcttttaagggtgctaaatattcttctactgaattagcttgtggctgctcgtacataccacgatatttatctggaaacggaatatgataaaaaccattcaataacggaccataatgtttgcgcatatttaaactaatagctgacatagacaatgagccaaaagttgaaccatgatatgcattagtgaaactaatgatataaggacgccctgtatatgctctggcaaatttaatgatgccatcatttgcgtctgatccagttaatccgaaggtcactcttttttcaaaatctccaggtgcaatctcacaaagcttcttagctaaacgtaccaacggttcatgatacatatatgctggtgtataatgaataaatttatcaacttgtgcctttatcgcttctgttacttctctaggtgcatgacctacgttttgagaactcgcactcgataacaaatcgatatatgtcttcccctcaatatcaaccaatgttgctccatatccatgatcaataactaacggataatatttaatacgtcctggtttcgcaaaataatgttcatcctcttgaattaattgatgtgctttactcatatacattcccctcccattgacagaccttattcacataattaccttccctatatcgataaccacattcgatttgatatcacgtgaaaataccgtcatgcctctatgaatactatccaatatactaataaaattcagatttgtaaatatattctgataattaagaattttatatcaatctactttgtttatgcgcataattttgttcgattagggaattgtttactatattccatttgactctgaggtgatacgaatgcgtttaaaagtattgttccatttcattgctgctattttcatatcattcatgttgctatggatgaccatgttgtttgacttaataagcaatcaatcacatttaaaagctttattattgaatttagattttctaattccttctgacaatacaccatatattctagaaataatatgtcacttactaattggtagcgtcatttattttgtatttgtgttgctgtttcatacttctaaaaggctttactatctatgttatatccctttatttttcttatttatagcattgtatccctttttagtatttattgcgcaacgtccaatttttcaatttagtgtgacagaattaatcggttggattattacacatattttctttatgtcattaatggcgttagtcatacctagaataaaataatatttttaattaaactgacaattatttttcacattttatacacttttcaaggtttatgacttgagaaatgttctcatttttatcatactggaggtgtattgaaaagttaaggagtggaaagtatgaataaagagcaattagaaaaaatgaaaaatggaaaaggctttattgccgcattagaccaaagtggtggtagtacaccaaaagcacttaaagaatatggtgtaaacgaagatcaatatagcaatgaagacgaaatgttccaacttgttcacgatatgcgtacacgtgtggtaacttcaccttcattctcatcagataaaattttgggtgctattcttttcgaacaaacaatggatcgcgaagtagaaggcaaatacactgcagattacttagctgataaaggtgttgttccgttcttaaaagtagacaaaggtcttgctgaagagcaaaatggtgttcaattaatgaaaccaatcgacaacttagacagcttattagatcgtgcaaacgagcgtcatatttttggtacaaaaatgcgttctaatattttagaattaaatgaacaaggtatcaaagacgttgttgaacaacaatttgaagtcgctaaacaaattattgctaaagggttagtgccaattatcgaaccagaagttaatattaacgcaaaagataaagctgacattgaaaaagtattaaaagctgagcttaaaaaaggtttagacagcttaaatgctgatcaattagttatgttaaaattaacaattcctactgaagctaacttatacaaagacttagctgaacatccaaatgttgttcgtatcgttgtattatcaggtggttacagcagagaaaaagcgaacgaattacttaaagataacgctgaacttatcgcaagcttctcacgtgcattagctagtgatttaagagctggacaatctaaagaagaattcgataaagcattaggtgacgctgtagaatcaatctacgacgcatctgtaaacaaaaactaatttatacattaaacgtattttttgatataaactactaaaaaggactcatacatgtgctttaaaggcattgtgtatgagtctttttgattaaagttgattttgcgtatgtattatagattacgcgaaaaaaatcggacagctgaaaaatctataagatttctcagttgcccgattttaaatatagctattagaatttagttttcgtagtaacctaattctaagtcttttgaagtttgtttacggatttttctcattaatttttcgtcttcaattaatgattcaccgtatgatggaatcattttcttaattttaggtgcccattcagttttgtattcagggaagttacgttctaatacttctaacgcaactgaaactgaagttgaagcccctggtgattcacctaataatgcgattacagtgtggtcttgtgagttaaccacttctgtaccgaattggatgaatcctttaccgtgttcaggtgtatctttgataacttgtacacgtttaccagcagtgtataattgccaatcttcattacgtgcttctggatagaaagtacgtaagtggttcatacaaccttcttttgtcataatcacttgatcaaatgagtatttaattaaaggtaagtttttaactgctgctgctaataaagttgtaatgttgtatgttttaacagacttgaataaatctaagttagaaccatttttcaagaatttaggtccaacattagcaaatggtccaaataacaatgttctttggccgtcaatgtaacgcgtatctaaatgaggtacagtcattggtggtgtaccaggtggctctttaccataaactttggcatcgtgttgttcaataacttgtgggtttgtacaagctaagaattgaccactgatagggaatccacctaaatgtttactttcagggatacctgttttttgtaataatggaattgctccaccgccagcaccgatgaatacatagtcagttacttgtttgaatttctcaccagttaggcgatttttaacagtaacttcccattgaccatttgataattgttcaaaatcaacaacttcatggttaaattgcactgtagcatttggatgtgcttcaatgcttttagccattttacgtgttaattcaccgaagtttacatctgtaccttcgtcaattttacttgccgccatgataccagggttatcttcacggcctttcatcatcaatggaatccattttttcattacttcgatgtcttcagtatattcgatattatcgaacatagggaaagctttcatcgcttcgtaacgatcttttaagaatttaacattgtttttacctctaacataactgatgtgtggtaatggattgataaattctcttgggttctcgatgctaccgcttttcactaagtgaccccagaattgttttgaaatctcaaactcttcgttaatcactttcgctttttcgatgtcgatagaaccatcaggttgtaaaactgtgtagttcaactcacataatgctgcatgacccgtaccagcattatttctttcgtttgaactttcaattgcaggacgatccaagcgttcgtaaacgtggatattccagtctggctcaatttcttttaacattgaaccaaatgttgtgctaagtacaccggctccaattaaaacgatgtctttactattagacttagccattggtttcacctctccaaaaattgtaaatgtgtatcatcaatatgaaagttacataaaactgacatatttctttaaaatatcaacgccatagataacttcctgttttaattgatacgctgtaacaaaatactatagttagtgcttacatgtatatgttaaagcaagcagtggtaaatgtaaattataattattcattaactttgcaatatattaaatcttttattcatagaagataaatatcaaatcgatcataattatttgacaacaaatagctaacgattgttttaatctacatttgacttatagcattttaaacctatactctattttgatacaatataagtgtaaaatcaatcataaaaaggagattcaatatatgcatctaagaaaatcacttcaattacctttaatattgaaatttattttgaatcttgcccttataggtattgtaattatcgttctaacacatactgagtttcaacttaatgtcggtgatagtaatgtgtttttattaaactgggatattcgaggtttaacatcttatattttctcattcttaatactggttgcgcttgtttctaaactaatattaatatttataactagacgacaaagaacatcataaataaacaagcagtccagtgcgtatcatcataccttacgcattggactgctttgctatgtttattgattgctatctttttgttgttgccatttttctatttcagcatctcgtagttcaacacgacgaattttacctgagtttgtttttggtaagtcgtcaacgaattcaatctctcttggatatttatatggtgcaacttcatttttaacaaattgttgtagttctttaactaacgtatcatcacccgcagtatggtcctgtaaaataacgaatgctttaacaatatttcctcgtatatcatgaggctttgctactacagcacattctttaacggctggatgattcgttaacgcatcttcaacttcaaaaggcccaatcgtatagcctgaactaataataatgtcatctcgacgtccttcaaaccagaaataaccatcatcatctacatgagctaagtcaccagtgatgtagtatttacctgtttgcgctttcgccgtacgttctggctctttataataccctttgaaaagtgctggcaaatcaagtggcactgcaatattccctttcgtattagcaggtacgctattcccctcatcatctactacagtgaccgaactacccggaatgcctttacccattgatccaatcctttgtggtgtatcttttaaaaagcctataagcaaggtactttcagtctggccatatccatctcttacagttaaattaaagtatttcttgaattgttcaactacttctcgatttagtggctcacctgcagaaacggcactatgtaaatgcgttaagtcataatcatttaagttctgtaatttagccatcatacgatattctgtcggtgtacaacataaaacattaatttgatatttttgaagcaattctaagtatgtttcagggctgaatcttccattaaatacaaaagcagttgcacctgaacctaatacagataagaaaggactccatacccatttttgccaacctggtgctgctgttgcccaaactaagtcatcttcattaatacataaccaatgttttggtgccatttgtaaatgtgcaaatccccatccatgacaatgtgtaacggctttaggattgccagttgtaccagatgtatatgacagaatcgccatatcatcacgcgttgtatctgccatttctagtttgttacttgcgttttctttttcagcttcaagtgaaatccatccatctttttgaccggcaataacaaatttagttaacgcatcatattctttaattttttcaaattcaactgtgaatggctctaatgcaatgactgcatttatttcaccgtgcgtgatacggtattgtaaatctttagttcttagcatttcagaacatggaatgattgcaacacctaattttaaagcagcaatatataattcatacgtcgcaatagatcgtggcatcataatgagtactttatcgcctttagataaaccatgcgatgctaaaacattacctactttattagactgttcaatgagctgttggtaagtgactgatatatcttcgccttcagtattatgatataaaatcgcctttttatctggtatgtggctatatttttcgatttccgaaataatgttatatttttcaggcgcgaatagagctgacttttgcataactaacttcctttcatacatccacttttcctgtgatgaacattgtaattttataaatgaattatatatatcatacgcctatctttacagaattttcaattaaatagggttaaatatcaaagtcctcgacactacactttgacatgacgtagcattcaaggactttcaaatgattgaggggtgatatctcgggctagaccatatcagctaattcaatacgaatattgtatgataattcacgattaattatttttacatctgcacctttcgaagtgccacgatgcttgtgtgtatgcttgtactcagctgaattttgccaatgataaaatgcttgcctattttcccacagcgtaataatgatatagtgtctaccagctgttctaggtcttaaaaaccttaatgctttgaacccatcaacgttttttaaatgcttattacgttgcaaaaatttttgctcaaatgtttcttcttgtccttcgttaatatataaatgatttaacacacataatgaatcatttgataaatcatttatcgcttctagaacatcgtaatatgcagtgtcattatttttttgtattgtgagacaatcatccagttcttctattacataacttctatattcatcataaatgttcataataaatgccttcatttcatttatatttttggtcatattactttatatctattactaattcattcccgtatttattaattacaatcatagtttggcttctttttaaaagataagactttgtaaaaagtattaatatttcatacaaatggggacaggagtcgcccgctatttttgtgtcttcaatttcataatcattatttaacattagtcatgaaaatagccgacaacttcatctgtgaaatcaccggccttttattttagctaactttatttctgattttacgattttaattgatcatacagagaaagtgatctttttacaatttctaaaaactcatgatctatattggacatttgatgaaaataagacaaaatgttttctgttagcttctcttgttttgggaatgaatcatcttctttaatccaaatcgctaattcgcctaatggtgttttatcatctttaaatgtttgtatatattcgtaaaagctcatagtattccttctctcaatttacttatataaatcctaccacgaaagctttcaagaaaacacaattaaatgtctatttagtgaactttttaaggttgtacactcttttaatgtctgccaattaggtcaattaatcatcacaatgtacaattaactctactttcagttcatatactcacacacaccgtttttgaacaacacattaacttctcatttagataaaacgcaaaaaagcctggcaccaatacaatagatgccagactaagagtctactatataaatttatttagcgtatggtttcacttcgattgcaccttcattttcatcatgaacaccatgcttataataatcaatatattgtggctctaaaggctttctgccacgtataatgtctgctgctttttcagctaacattaaaacaggtgcatgtatattgccatttgtcgtacgtggcatagctgatgcatcaactacacgtaaattttccataccgtggactttcattgttaacgggtcaactactgccattggatctgaagcaggacccattttagcactacaagatgggtgtaatgctgtttcaccatctctacgaacccaatcaagaatttcttcgtctgtttgcacttctggtcctggtgaaatttctccaccattgaatggatccattgctttttgagataaaatatttcttgctacacgaattgcttctacccactcttttttatcttcttctgttgataaataattaaagcggatacttggtttttcgaatggatctttagatttgattttcaagctaccacgagagtttgaatacattggtcctacgtgaacttgataaccatgtgcgaccgctgccttttgaccatcatatcttacagctattggtaagaaatggaacattaagttaggataatcaacttcgttatttgaacgtacaaatccgccaccttcaaaatggttagatgctgctgcacctgtacgtgtgaaaatccattgtaaaccaataaatggcatgcgcttgatatctaagcttggctgtaatgatacaggttccttacatttatgttgaatgtatacctctaagtgatcttcaaagttttcacccacaccaggtaaatgaacacgtggctcaatgccttttgattttaggaactctgaatcaccgataccagataattgtagtaattgtggcgtattgaatgccccaccagacaaaatgacttcattagcatcgatcgtatgtagtttgccatttttcttatacgtaacaccagttgctcttctaccttcataatgaatttcagttacaaaggcacgtgtttcaacggttaagtttttacgcttcatagctggatgtaaatatgctcttgaagctgacattcggcgaccacgatgtacttgactatcgaacggtccaaaaccttcctgtctaaatccattcacatcaggtgttttatgatagcctgcttcaacacctgcatcaaagaatgactggaataaaggattcgttgctggccctcgttttaacttaattggtccatcatggcctctaaatttatcataaggcgctgcaccgtatgttttttctaattttttaaaatacggtaaacagtgcgcaaaatcccaagtttccataccttctggttctgcccagccttcatagtccattggattaccacgttgataaatcatgccattaatcgaacttgatccacctaaaactttacctcgggcatgtgctactttacgaccgcccatatgtggttcttcatctgttgaataaatccaatcgtaaaatttattgcctgaagggaacattaacgcagcaggcatttggataaataaatcccaaaaataatcactgcgacctgcttctaatactaagacttctttatctttatcttcactcagacgattacctagtacagaacctgcactgcctcctccaatgatgacataatcatatgatttatttttgttactcatcgttatgacctccaaagtttgttgtatttcaaagtgagtattgcatgaaatatttgttagtggctgattggttatcgttgaattgctaaacttagctaaccaaaacactcgattttacttttatgattgttactaacagtcatgaaataatctatgattaattttgcgtttagtccaaattatcaatcaacatatcgccacttatacaaaacaaagtgagtgtcttgtgttcttacaatggcactcaccttatctaatttttatttgctaaaccaattcactaattgtggatttgtatttgttaaaatgtgttttgaaacaaggtactcttctaagccttctttgcctaattctctaccgatacctgattgtttgtatccaccccatggcgcttgtgcaaaatatggatggaaatcattaatccacaccgttccaagtttcaacttgttagcaacgcgttgtgcttttccaatatctttagaaaatacagcacctgctaaaccatatatagaatcattcgctaattgaatcgcttcttgttcagtttcaaagccttctacagtaacgacaggtccgaaaacctcttcttgtacaatacgcattgacgtatcacaatttgtaatgactgttggctcgaagaataggccatcttttaaatcgtctctatctggacgtttaccaccaacagcaattgttgcgccttctgctttagctacatccatataagattcgatcttattacgatgttctgttgaaataactggtcccatttcagtatcagcatcaaaaccattacctaatttgatttttttcacgcgatcaataagtgcttgctcaaatttgtctttaatactgttttgtactaatattcttgatcctgctgaacaaacttgacctgcatggaaatatccaccatttaacgcttggtctaccgccaattcaaaatcagcatcatcaaagataatgtttggatttttaccgccaagttccaaggcaatattcgtaacattattagcagcatttttcataatatgcttaccagtctcaatgccacctgtaaatgatacaaggtcaacctctttatgacctgacattacgtcaccaacttcagaacctgcacctagaataagattaattgttcctttagggaaaccaacttcttccattaattcaaaaacacgtattgttgttaatggtgtaatttcacttggtttcataactagtgaacaacccgtagcaagcgctggcgcaattttccatgatgcttgtaataacggataattccaaggtgtaatttgtgtaactacacctactggttctttaacaattttgctttctgtatctggaattggtgaatcaatcatttcgccaccatctttatctgctaatccagcaaaatacataaacacattatgaatatcatccatatctgcatatgattcttctaacgtttttccagtatctaatgtttctaatcgtgctaacgcttcgcgatgttctttgatcttgtccgcgatggcacgtacttttttacctcttgtttcagcagtttcttgcgaccattcaccagactcaaacgcacgtcttgcagctaagattgcacgttctgcatcctcttttgtcccttcagaaaccgtaaatatcacttcttgattgtaaggattgataatatctcttgtatttttattcgcgctttcaacccactcaccatcaatatattgacgctgagataaatgttttaaaagttccattcaacaacctccgttaagtttgttaaatttttatttaacgaattttacaaacttatgttagcatagaaatgaaaaatgtgtcaatttacaaaacaactcaagaattaagttttgtagattcgttagatttttatttaacgaaacatttaactttaatgctttaaatatttttaatgtctttttttagaaaaggttttataatgtattagtatttattttaacgtgaccaaaatgatgtacggaggtgcaatgatgactcgttctcagaacaaacagcaacaattagaacaagcaaaagatattgtaattaattcaattggacagacaatggatttgtatggcactaatagaagtgtaggaaacttatatggcactatggtgtttgaaggcagtatgacgcttgatgaaatgcgtcatcaattgcaaatgagcaaaccaagtatgagtgctggcgttaagaaattgcaggaatttgatattgttaaacaacaatttacgagaggaagccgcaaacaacattttatcgccgagaaagactttttcatctttttccgaaactttttcactaaaaaatttcagcgtgaaattgacatcaatgtcgaagcagtaaaagatgctcaggctattatcaatccattacttgaaagcagtgatttaactgaagctgaaacacaagaggcacaaaaaattaaagctcagcttgatcatacacatgtttattacgaatggttagaacagttaaccgaagcgattgaaagcggtgaaattttcaaatatttcccaattccagaacatccttctgattctgaaaattaaaattgactctaacaacgacaatgatgattatgcatgatgaaaacaatgcaataggtccacgaaataaacggtaatttctatctcaataaatagaaattaccgtttttgttttatatgacaatcaattatggagttattttctagagttttcttagattcgttacattgcttcgccaatatatttcaattagctattctcgccctcacgtactctatcaataatattttgtatttgttcacgtttttcatattcattttctacaaaataaactaacggttcatctttgatagtaacccaaggtacaagtacatcaaaatctaattctttaaccatctctaaactttgaatagatttttctctatcacttgaacctaatataactgtacgccatctcttcccttcaaaacatataaaatctccagtaaataagtaacgatgatgaccatcatcccacaaaaacagtgtcgtccctggtgtatgtccaggagcgggaataacttctaaatcctcatccaacattacacgattactaaattgtttttgaacagaaatcttatgtttcagtgcggccacatcattttcatgtataaagtaaggggcttcaacttgattagaacctcctatagattcatgatcatgattcatcaatacttttgaaacaccacctaatgatgcaatgtcttgttgggagtcacctaagtgtccggaatgatagataacaatattacctgtttcacgttttagaataaaagatttaaatagaaatcgattatcaaaaggcagttccgaagtaggtgtcgcatataagttttttgtgatggattctaaactgtcatgtaatttggactgtttatttttaaattgattagtcattttatttcatccttcgattaatttgaattgtacatacgcaataccctttatttaatttaataatcaataagaatctttcaaacttcgatttagaatatgcttcatacaataaataagtacttggagcactaaaaaattaaatcttttagtaaaacattaatgaaaacctaaaagttcatcctacaatgctactaaaaaaaggggaatggaacagaaatgatattttcacaaaattcatttcgtcgtcccagacccgctttgaattataaattatcgtcttgttcttcttctgatacttgaacgattcgcaatgaacgacgttcaacttcttttaatttttcagcacgcgtttcaagtttaattctatcgcgtcctaaaatgattaaaaatgatatcatcatgaaaataaaaataacaattaatggcacacttgccagtattgaagcagttttcaatacttctaatgcacgttcgccaccaactagcatcaatgaaaatggcaataagcacaatgcaaatgcccagaataaacgattggcacgtaatggttcgcctaccacttttttctgagatgctgccgctaaaatatatgaacccgaatcaaatgttgttgctaagaataagaaagcagatactaagaatagtacaatcatcaatgatgggaacggtaaatgatgcaccacttcaataatggttgcctctgtaccatgtgtatttaaatattgtgttacattaaactgtccagaaatttgtaaatacacagcatagttaccaaaaataccaaagaataatacacatccaagcgttccataaataattgttcctagcacaacttctttaaggcgtcgaccttttgaaattctagcgataaataaaccgataaatggcgcatatactaaccaccatgaccagtagaatattgtccagtcttgtgggaaattcgtttcttttcgacctttaataccaccgaatggttctaaccatgttgccatatggaaaaaatctctcaacatatttccgaaccctgtcactgtcgtttccataataaaaacagtcggtccaataataaatataaaggctaaaagtacaaatgatagccaaacgttgatatcacttagcttttgaataccttttttcaatcctgtatatgaactaatagcaaatatgaccgtaatcgttaataaaatggccgaacgtaaaatcatatttttaccatctaaaccagttaatctttctatgcctgcagaaattaatggcacacctaacgctagtgaagttgccgcaccacctagcaatccaaagataaataagatatctacaactttacctacaaatttatctgtttgaccttttaaaatcggacgacaagcttgactaattttatacaccggttgttttttaacaaacactaaataaccaattggtaatgctggtaaaacgtaaatagcccaagcaattggtccccagtggaacataccatattgcgtcgcatattggagtgcttcatcactcatacttttcgcgccatttggtggaacttgatagtaaaaagcccattcaataacgccccagtataaaatatcagagcctatgcctgcacaaaaaagcattgccgcccatgtaaatgtattaaattctggtttatcacttgctttaccaagtgtgacattaccatatttaccaaatgcgatatacattacaaagcaaaaaatcgccagccccataaataaatatatcgaaccaattgaatcagaaatggcactattaataccagtgatgatatcttcacttgcttttggaaaagccatcataggtataactgcaaaaagaagtacagctactgtccctataaaggtcgtccagtccataactttctcttttttcaattgtgctccccctaattattaattttatgaatcctgtttcgatttatctcaaaatgtaataattatattgattcacaaaattgacaataactaatatttaataataatgcaaatttcatacaatttgaaacttggcaattattgaatatttatataattttcctcgtaataaacaaaactttaatagcgctaaaacaactgtgttaagttatgatttaacgaatttaacaaattttactagaacggcatttaagaatatttatacgttattaacgaatatttatttattgtaaaacgctaccaaaaagttagacttccttcccactaaagtaccacttttcactttcaacttttttaaaaaacggatatgcaacttttagtattagtatcaaaatgattgttaggtcatattctatcaatatatttttctaaagaattgcttttattaactttcaattatgtacctaacataaaaagaagccaaggcaacggatgttaccttgacttctaatacattttcaactaacaatatattcaatcatacgcgcatgcgagagtgattgttgtacatctataatgcgttgatttaaagaacctttatatggtaaatcaggtttgaataagtgttgtataaatagcccatctactaaaacgtcaatgtatgataataactctcgacgttctgtacaatcatttgctaaatattcatataaaaatccagtccatacccaaattgtctttgtatttccaaaacgtgctcgaaatgctttgacaagatttaatgtaatatccaaattgcaaaatggttcgccacctaatagacttagcccagatatataatcatgatcgcaatcatctaatatttctgctaatatttcatcagtgtatttctcgccatatctgaacttttgtgaggctttgttgtaacatccaacacaattaaatggacatcctgatacataaacactgcatcttactccttcaccgtcaacaaagctatttgattctattttagcaatataaccttgtccttgtttaatgtctaaaagtgtcattctttaggcgctttcatatgttttactcgtgcgcaaatttctttatgacggcctttaattactggacgttgaactggattgcctaagtaaccacatgttcgtttaacgacatcaactgttttaggattatcattgccacagttcgggcatttaaatcccttttcagttgcttcaaaatctccgtcgtaatcacattcataacaatgatcaatcggaatatttgtacctaagtaaccaactttgtcataagagtagtcccataccgcttctagtgctttcaaattgtgttgcaatttcggatactcacaatagtgaatgaaaccaccactcgcataataaggataatctttttcaaaatctaacttttcaaaaggtgtaacatctttacgtacatcataatggaaagagttttgataatatcctttatctgtaatgtctttaatatctccaaatctctcttggtctaaacgacaaaaacgatccgttagcgattcactcggcgtactgtaaatactgaaccaaatgtcatataattctgtccatttcgtttgataacgtttcatttctttaagaatttcaagcgtaaatgcttttgcttcttgagatgtttcccagtctggaccatagaaaacagtagctgtttcgtataacccaatatagcccattgaaatcgttgcacgtttatttttaaataactcagcaacatcatctgtttcttttaatttatagttaaaagcgccacttttatataaaattggtgcgttattcggtacagcatctttcaaacgatttatacgataaagtaatgcatcatgtaacacatcgatacgttcataaaagatttcccagaatttcgtcatattaccggcagattctaatgccattctaggtaaattaagtgtaacaacaccaagattacaacgaccattattttcaaaatgaccttccgcatctttccaacttggtaaaaatgaacgacaacccattggcgctttgaaatcacctaatatttctacgagtttgtcataatttaaaatatctggatacatacgtttcgttgaacactttaatgctagttgtttaatgtcatagttcggatcttgcggactaaagttggttccttttttaattgaaaatacaagttttgggaaaatcgctgtcgtgcggtcttttcctaagcctttgatacgagtatttaagatagcttgttgaattttgcgacttaaatgatctgtgcctaagccgaatcctaatgttacaaaaggtgtctgtccattagatgtatataaggtattaatttcatattctaaactttcaatcgcatcattgatgtctttagtgacttgttgatcaacataacgatcaatttcagattctttgacaaattgctttgcgatatttctatgttgttcttcattatgtcgtgcatatgtactaagtaattcgtcaacgcggtcaaccgtacagccaccatattgactgctagaaacattggctataatttgtacaagctgcgctgatgcagtttgtattgattttggtgaagttacattcgcgttgcctatttcaaatccattatgtagcatatttttagcatctattaaacaacagtttgttaacggttggaatggatgataatctaagtcgtgaaaatgtatgtcccctctttgatgtgcatctgcaacgtgctttggtaataaatgatttaatgcgtaagatttagaaacgatacctgctgttaaatctctcattgttgaaaatgtatcactatctttgttggcattttcgttaacaatagcaggatctttagaaatcaaacccgttaatgcttcttcgatttgattcattttaccccttcttcctatatattgtgtctacccattacgttataccactatatatagtattttcaaatttttattagtctgttaactaaaacgtcacaaagttattaacatttagtgaaattcatatttccacacaattatttcattaatttttaaaattgtttaaagattcgtccgtcatttcgacatgtttatgcaactattatttcattttgtaacgggaccatagtttctatttttttcatacttaaatcgtcacaatacccatcaacattgcaattactaacataacgatggcgaatccccaaatccaaaagaatgcatacttaatatacgtgcccatatttgcctctgctaaaccaattgccaaccataaggctggtgaaaatgggctgacaaatgtacctataatattccctatgaccattgaataagctgttgatacagacggtacaccaaattgccctgctgtttgttcgacgatcggtaacacagcaaaataataagcgtctgtgctagttagtaaatctaatggtacgccaagtaaacctacaataatatgcaagtatggtcctacttctgcaggaatcactttgattaaattggtcgcaatcgctttaagcataccggtttcatttagtacacctaaaaacatacctgctgcaataatcactgcagccatcattaatgcattcggcgcatgcgctcttaatcgctccatttgttcatccactgatttaaaattaataacaagtgccaacgaaacacctatcatgaatgcaaattcaggtggcgcaatatttattaacatcgctagaataacagctaaagttaaagctgtattcacccattttatccatggttttgttcgtgcacgtccttttacaggaaaccttatatcttgatctcgttcatatacttcaactaatttatgtacatctatatcttgtgtttgcggtaattcatttctctctattgcttttttaatacgcttttgttctttaaatccaagataaaccgcaaataacataacaagaatgaaacctattatttgaataggtattaatccaaaccataattcattgacacttttagcttttaaaacagcagctacccgcgccatcgggcctccccaaggtaccatgttcataattgcagcacttaatgctaatagtaaaatcaataaatatttattcatatttaacgctttatataaaggtaataaggcaggtatagaaagtaaaaatgttacagcacctgcaccatctaattgcgctaaagtaccaattaaagctgtcattgcacagacaatgacaacatttcctcttgtcatcaagattaagcgttttacgagtggcttgaacaaaccactatcgttcatgatgccaaagaaaataatggcaaatataaacatgataaccacattaatgacttgatttaatcctttagaaaaaaaatcaaccaaatccgtcacactatatcctaaaatcattgcccctatacaaggtattatcgtcatccctacaacaggatttatttttttcgcaatgagtaaacctactattgaaataataataatgagccccattactgttaaccataaattatcactactcatattattttctccctccattaaatataaaattcacataatccccctctttaacttaaatattataattaatatatttttttatatttaagttatctcattttatcaaaaaaatcttttttgcgtaatagttaattcggatatctaatttttatgcagtgtctctaatgactatttgaatccaattgactaatttgaatcttttcataagtatcatttttaatagcaatggttgaattctcggttctattacacaaaaaaactggctaaaattagctattattcatagcaacttcaaccagtttttctaataacctatatatttattaagatttttcaaatcgtctatttctctatgttagaaatcatcttacatatgtttatcatcttcacttagaaattattagtgtgcatcccatcttcatttacaaacagacatgttattacttcaagactgcctttagacggcacacagttattattttttatctaaccatgccaaaaattgagcttgtttagtatcgtttaaaaattctttcgtcactatttgtgataacaattgctgcttttcgctgtgattcatatcaagtacttttattttctgtcggcaagtatataaaaagtcgatatacgaactgtatgatggtggatataacgcctcaagctctgccataattgattttgtcaacttaggactcgcaccatcagttgatacactgatagttagcttgtcgcggtgtagtgcacttggaaatacaacattgccatttgatgcatctccaacattattaaaaagggcatgctcaggtaaggcttgttttaccgcttcattgacacgtggctcattggttgctgcaatgactagatacgcgtctacaatatcgcttggttcaaattctttttctttccatatgacgacacctttatctaccatattttgaagtttttcagtgatttcaggactgataaccattatatgttcaatatattgacttaatgtttgtgcccgacgacttgcaacgacgcctccaccaactatgatgacatttttatttgttaaatctatcattaatggcatattcatgttgagcaacatcctttatataattttacatcattacaccttaaaatatttaacaccaatcgctaataaacatcacgttgatagcgttgttgttgtttcatttgtcgcaataataactctgcttcttcttgagaaatatgacgttcttttaccaatacatctttaatggcttgatggacatctttcgccatacatttttcatcgccacaaatatagattgctgcgccttgctcaatccattcattgaaacgttcactttcttccattatacgatgctgtacatattctttatgttcttggtctcttgaaaatgctaaatctacgcgtgttaagtttccattttcaagccattcttctatttcttcttcatataaaaagtcagaactacggtgttgatcaccaaagaacaaccatgtttttccagtcataccaagttcttcacgttcttgtaaatatgctctaaaaggagcaattccagtacctggtccaatcataataaccggtatatcttgcttcatcggaaatttgaagttcggatttttcttcaaataaattggtactatatcgcctggtttaatacgctcagcaaaatgaaccgagcatacaccttttctctcacgtccatgtgcttgataacgaaccgtaccaacggtaatatgcacttcatctggcgttgccataaaactactagaaatcgaatactctcttggtggtaattttctaaggatttgatacatattctcaggctgtaattctatagttggaaaatctgttattaaatctataaagtcccgatttataacatattcacgcgcccatgactcatcttgaatacgttcagataattcttcattgtcaaaatagatatctgcatttttcaataatggcaatgttaatttagtaaattcaaaatgtgatgttagtgcttcaacaataggaactgtatcaccatgatcattaattggcaccggagattgtggatcccaacctaacatggatattagttttccaaccaattcagggtcgttttgcggtaatgctactatacaatctcctggttcatatgattcactaaaatcatcaagtaaaaattctatatgtcgtgtttctttatttgaatcggtaccatttaaattgatattcgctaaaacttctgcttggtatggatttgatttagaatatttcttttctttggcagacttaattgattcacttatcaccgattcactttgaataccttctgatgtggtatcaataatattaatgatgtctgccatccacttttctgcgtcttcttcataatcaatatcacaatctacacgcttacatatacgctcagcgcctagattttctagtaaagcatctacatctttaccggcttgacagaaaaattcatatgtttgatcacctaaagctagtactgaatatctcacatgatttaaattaggtgcgttatcgtcttctaaaaattcaaagaaatcccatgcattatcaggcggttctccttcaccatgagtagacgtaataataaataaatcttctaactgtgcgatgtttgtcgtatcatattcatccattgacatcaaaacaacttgatgtccgatatcacttaatcgttctgaaaaaatttcagctaaacgcatggcattacctgattcagaaccatatagcactgtgacatgccgctgattagcttcaatatgtggctctttattttgtaacatatacgttgttgaagttgcttgttcttctgatatttgtgattgttgccacacttctgtctctaattgttgttgattactatcacttgtcgtatcgttactattagctagtaaaaaaccactaagccactgttgttggctctctgttaatgtttgcagcagattgttaatctctgtgacttgtttttctgtaaatggactattagatgtatttaatttcaaatattttcacctcaataaacttgaaatagatgattgactcattttttatcgatagtttagtcaattttttaatatgtatggtataaattaaaacaaacttgagttgtgtctgatagttatacttgcaaatatttacaaccttcatgttgcttgaatgacattatcagtaattcagacaaaactttgattatgtcgtgtcagtaattaatgcatacagtaatgcatcgttgttatttttttatttatttactatttattatgtaccaaatcagcctttcagtaaaataggtcaaattactgattttctaaatataaaatgcctcctaatgacatactattagtacatcattaagaggctcttgtgttatttgcatactaagcgctcaattttaaatttaagatgaagattcttgcaataatatttctatatttgccgatatatccaatggatcttccattggcaagaatcgatttacaacattgccttgtcgatcgattataaattttgtgaaattccattttattggggacccaaagattcctggttgttcattctttaaatgcgtaaataacggatgttcatcgttcccgttcacagatattttagctagcactggaaatgtaacaccaaatttctcacgactaattttcaagatttcttcattagaacctggttgtcgattgtcaaaattattattcggaaaactcaacactacaaacccacgatccttatatttttgaaacaaagtctctagttttttcaattgttcgctatatatacattctgttgcagtattaacaactaaaatcactttacctctaaatgcttctaatttataagttaagcctttataatcacttacttcgatatcatacacatttctattattcataagacacccctacacagccttttttatattgaatatgttctttttagaatgttctgataaaataagtgcgcgtttataccgcgaacacacattatatagcgtgatacatttttcgagcacacgataaataatgttcgagtttatgttgttgctcaacctatccgatttaccgtcttttttcacctgtcttactttattaaaataatcacattgtatagctgtattagtccagctacaatatctttcgttataacccctcattataatcatccttattttctatttttaaaaagacaattagaccgctctttaaactatagattaatacttaagttaaactcatacatactgataccatacgttaaatctaacaatttaaaattcgttataactatggattaaagagctgcccaactcatataatccttaaaaacttcacatgtgattgtttattaagccctcctttatcttattaaatatccttataacccttttaaaattaaactgacacactcatacatagttacacgcgacgataaacgtcatattattgcatatcattaaaacaagtcactttgtatcgtgtgcgaccgaatacatattaaatcatcaataatgattattcaattattaaaaataaaaacgaacattctatatagagtttccacttattgttttttcagcattgtcttcattacttaacattcgtgtttgtaagtaatattgaccaccaatatttagacactttataagtatgccattcatcatttttaatcatattatttttcatattgatatttctattcatatatttctgattgtatatttagatataatcatttgttattggaaaatatatgaaacaaatttgactcatctttttcaatatctaaatgacacgatgcatgatttttgaattttgtaattaatttacttttaaattagaatgaattgtgacaattttcaaacattttaatgtgtaaatcattggcaaaatatacgaattgcatttaaatcgtcaatttacatatatttttgcgtagtaatcaatcgttatcattgttatttatcgttacattatttcgagtatcagtatgtatttcgggcttcgtttgataacgacatttctttgtgacatcgcttcatcagtgtaacaacaaatacaatgatttcgtgatgttagttacccattttatgtgttgcataaaatatgttgttataaaacattttaaatcattttatataaacaagctatatatttttgatttttccaaaatatcacttgttatattaaaaaccgacaagacattttatcttatcggttgaaatttgttattgttatttgtaatgtttttaggtttctttttaatataatatatttcagtgaaaatacatgattgattgtgatttcactgaaacatggttaattacgttgttgatgaataactttagcataaatataggaagttattttgtacatcgccatatatagaaacgaaattataatgacagctagtatgtaacttgttaaaaatatatgatggttattaatacctatcatatttagtaacgtatatacaatgttactagaaattaatgtatgaatcagtgctactgttattggtattgcgaacaagaaagtcatttgatttcgtgttatctttgctattcttccattatctaaaccaagttttttcataatgtcataattatgctgatttgcataggcttctgaaacttgtttatagtacatcattaaaaatattccaatgacaagtacaattgatactaccccacctacaaatattagtccacctgtcagacgatcccaaaccattagcatttctgatctagaatttattgacgcatcgtattttttcgatagcttttgtatttgtgatgttgttaatttcgtctttccagatacattaaagtttatcgatattgtcgacttcttttgttcatgtgcataaaatccttttactttttgtaattgattgttatctttaacaattaaaaccatactatcttgaatcatcatcaaatttaacgcatgtgcgtcaagttgtttcactttaaagacttcattattaagaccgaccttagactgctttttaaaaataggtacattcgtaatcatacctatactttgattgtctaagtgtaatttgttttggtgatatcgattataatcttgcacagtaagtgctgtgatcattactgattgtcttgaaaatatcaatccttcattaccaatgaagtctattggaatatcatcactagcctgttttaacttgtaataagcacgattcttttctaaagaagctctaaataatgtcgtttcatatactttaaagtcttttgcattaaccgaaccctgtatatcacgtttaatattctcaatcgtttgttgacgttctatttgtgacttagaattgtcgttaaatgacaaatcataatcattcgtaatcaacttcgtaatggtatgattcatatcgcgataggttgttaatgtcattgtgagtgttacaatcaaaaatgtacacagcaaagtgattgttgcaagactgactgcattcattttaagacgtacacgcatcccaactaccacaaaaaaataccgtggatgatagtaaacttttgatacctgctgcaatatactaataattatttcacttatacctacaaaaaatgcataagtaccgataataactaatcctatgacaatccatattttaaaaaaggcaccaaacgtcgtatcttgttgtaatgcaataaagtagcctaaatatagcgctgcgcttcctataacaattaaaacgtaacgcaaccatcgtgatatgacactggaatcggaacgatgttgataagttatcggtcgttgaaaattaatactgaacaagttgaatataagtagcatgcccattaatacagcaatgataatcaaagtaataaacatcgctacagaatcaaatggataataccttaaagtcgcaacttcactgcccattattttctgtataaacaagaaaaatatcgcaccaagtaagtatccgccggcaatactaatgactgaaattattataaattgtaagatagtttccatcactacaattaaacgcatacttttcttggtcatgcccaatgtcataaaaatgctaaactcttttcgtctttgtgacatcataaagtgatttgcatagaaaataaaaataaaagttaaaagcgccataaaaaaattagctatgataataaatggtactaggaagtcattcttctgttttatgtagctatttaacccaattgacacaagcgtatattcaatcatgaatagtacacttaccgctaaaatgaatggaatgattacaagttgctgcgtgataaattgacgtcgcattatgtgccataacaatcttaacttcatatattgacacttcctccattcacaagtgctaagctatctgttattcgttgttgaaaagctaattgactttcttcaccacgatatatttcatgatatagacgcccatctttaataaaaatgacacgctctgcataagacgcatcgatatttgaatgagttaccattaaaattgtctgttccaattgatgaatctcttgaaataacatcatcaatgcctttgatgtttttgaatcaagtgcacctgtaggttcatcggctagtaaaatcgtcggtttagtaactaatgcacgtgcaatggcaatgcgttgcttctgaccccctgagatttcagaaggatatttgtttaaaaatccctctaaatgtaattgtactgtcaactgatgtaccctttgttctatatcttttcgtttagcaccagctaaaattaatggcatcattatattttctttattcgtcattgttggtaaaagattaaaatcttgaaaaacaaaacctaccatttgttgacgatacaatgctttacttttatttttcatattatttaaatgtgcgtcatccacaataatgtcaccttcagttagtccatcaaaagaagcaattaaatttagtagtgtagacttccctgacccagactcacccataattgcaacaaattcaccagctccaactgataaattcatttgattaagtgctgtcgtagcattcaaacctttaccataaaccttttttacatgtttcacttctagcaacatggcatgcacctcatttctttgttagttctatattaaaacaaaaaaatactaataacatttaaattagtgaaaaaatgttactagtatgcttacaatattgaaagtttttattcatctggaaattgaatcgtaaatgttgtaccctcattttgtttagatacgactgaaacaggatggtttgtgtgagttgaaatttgttttacgataaataaaccaatcccacttgagttactttggcgctggccattataacctgaatagcccttatcaaatattttaggcaagtccgcttcactaataccaacaccattatcttttacgtataattgattggattgctcatcaaattcaatccatatatctttacctctcgcatacttaagtgcattatttattaattgttctatcattaaagaggtccatctaacgtcagttaatacttcgtgatgacaaggttcataatggatttttgttttttgatcaataaactgtattgaatatttcataataattgggcgaatgatattgttaatcgaaattttagtgacagaaatatcagaagtttcatttaataactttaaataactaagtgctaaacttgtatagttatcaatttgaataacctcttgacgaacacgattcacaacattaggctcatctctttcaagtaacagttgtgctgcagtaatgggtgttttcatttgatgtacccatgttaaaaagtagctctctacatcatttttatattcaatttgttcatttttaagctgatacaacgcattttctaagttttcaatttgttgttgttggcttatagtttttacaaaacttaaatatttaatacctatgaatatgagtaataataataaaataacgccaagtgctagtaaatatgcttctaatggcaaatgatacaggtaaaacattaagccaaataaagcaaaaataactatgactattgctatttcctgagtaatacttttaagaaaggtcattgcattcaccctatactttatatccgacatttttctttgtaatgataaaatcattaacgccaatagtatttaattttttacgcaggcgcgtcatgttaacagctaatgtgttatcatctatgaagttttctgattcccaacatttttcaattaaagcagttctacttacatatttatcttcattttgaaataataactttaatatttgtaattcagtcaaagatagctgtatgttttgttcttgatacacgacttttgcttcatctaatattaatgtacaacctttaaccgtcatcgaatcattagctactgacaagtcataagttcgtctcaataatgcttgaattttggcaatcgttaatgacaagttaaatggtttttcgataaaatcatctccccccatttgtattgccataatttggtccatattatcaatacgggaactaataaatataattggcacattagatgtttttcggatttcttgacaccaatgaaaaccatttaacgttggcaaattaatatctagcaatacaagctgaggttgatgttggttaaagatagacagaatatcatcaaattgttcaacgacaataacaccgtaattccattttttaagttcagatgctaaactttctgctataacaaaatcatcttcaacaattaatattttcatctataatcttcttccttcaattgaattatcctttgttatctttttgttctttagcctgctgcaatgacggctcttgatttgaactttccgtgtcatttgtattttgatttagtgtatttgctttttctttctcgagttgctttttcttcgtacgtttacgctcttctaaaatagacaacactataaagaatatgattaataatggagataacattactagtatcatttttccacctcaaattatatttaattctatattttcacacgcttctattctaacgctttctataacaaattgtcatatatattcattttttgttattctaaatcactctgtttacatatttttaactaaaactacataattgctcaaaattcctcttttacactgaagacatagtcatatactcaggaggatgtcttatgttatcagttaaaaaagccacaaaatttgcagttgctaaccttattatcgtgtcaacagttttcagttctgtcacacctgcaattgcgcaatccgataaaagttctaaagatgaaagtttcgcggttggtaatactaaaaatccaaaaaatgttatctttttagttggcgatggcatgggtccatcatttaacacagcttatcgttattataaaaatgatccgcatgccaaagaaatgacccctactgcttttgattcatatttaaaaggcacaaatcgtacatattcaaatgacccaaaacagaatattactgattctgcagctggcggaacagcctttagttctggtcataagacatataatggtgccatcggtgtggacagtaacaagcagaaagtaaagacggtgcttgaacgtgcaaaagaaaaagggaagtcgactggccttgtttcaacagctgaattaacagatgcaacaccagcagcatatgctgcacacgtgacttctagagatgataaaaacgaaatcgctaaacaattttataaagataaaatcaacggaaagcataaagttgatgttttattaggcggtggcgctaaatatttcggtaaaagtaatggcaatttagataaaaaattcaaaaaagatggttacgaccttgccacaaacagtaaggagttatcaaaatctgataaagataaagttcttggtttgtttgcagataaaaatatgccacttgcaatagatgcttctaaagacgaaccatcattagctgatatgcaacaaagtgcacttaataagcttgagcgtaataaaaaaggtttctttttaatggtcgaaggtgcttctatagataaatcagcgcattccaacgatattacaggcgttatgtctgaaatggaaggttttgaaaaagcattcgatgacgccattcaatatgctaagaaacataaagatacacttgtcgttgcaacagcagatcactctactggtggtctaacaattggtaaagataaaggatacgaatggaatcctcaaccgattaaatcgatgaaacactctggatcatatatgacagaaaaaatggctaaaggtgaagaccctgaaaaagttattaatgaaggttatggctttgaattttcacaagatgatatgaaaaaggttaaaaaagagaataaaaagttgcaaaaattacttaaaaaaataaagatgaaaaatctgcagatgtagaaaaacaaacaaaagccttacaacacgcaattcagaagccagtaaatgataaatcttatacaggatggacttccgatggacatacaggcgaagatgttaatacctacgcttatggacctagatcagaatcatttagtggtaatatcgaaaatacagaaagcgcaaaaataatatttgatatattcaagtaaagcataaaaaaattccccgagcactacaacaaggtgttcgggaattttttatggtttaatttagtactcaatgttaggtgcttggttaacacgttcttggtattttttaaatgcgaagtataaaccgccaactaatgttaaaataactgctaattttttcatcattcaaactcctttctaagatgtgttgaaactgagttcaattaaattatatgtttttattatacactttttgacatattttttaaatttaagaatgcgaagatttttaacatttctgatgctagctttctttttcatctttcaaatgcttaataaaatcaaagccaggtcgccctttagccaatgcttccatcacatcataccaatccgaaccgacttgttgatatatattttgcaataattcatcttgcgccttgttcaattcagcaatgagttgatcgcctttatccgtcgaatataattttttgacacgtcgatcagtctctaaaactttttcaataatgagaccttgctcttttaatttttgaagtgttgcatgtgatccttgtttagaaatttctaatatttctagtaatgatttaatagtaataccaggtaatttattgataaaaaacaaaaaacgatgatgctgacgactcataccatacttctctataatttcatcagcagtagtaataaacgttttatatgcaaaataaaacaacatatgctcataatcgtttttattggtcgacatgatgatgactcctttcaaagcgttaacctcattataataaaatttataatctaagtcatacaaatgatgataaaactataagctaaatctaagtttcacgagaaacatttttgtgtatcagcaaattgcgccagtcatattaatacaaaattaatttaaacactcagaaatgttagtcgtgagtaaatagtttgtatcactcactctgtgtatttaatgcagccacatattttccgagaaataattaatcattcaccatccatgttatagcacgcttaatcgcttggtcccaatatgcataatcatgatctcctggtccatcttcaaattgataaggaacatttttgcgtgataaatgatcgataaaatctaagttgtcttgatataaaaagtcttgtttaccacacataatgagcaattttggaatttgtttatcttcagctacagctttgtctagcaagtaatacggatcatgttcagttcctttaacacttgaaagattgccaattatggcttcttttgaaaaatcattccactctagatccattaaattttgcgcttcaaacacagcagataatggtacagctttggcaaatttatccccttgtgttaatgcaaatttaattgtgccatatcctcccatagagtgacctgcaataaaattgtcatcacgctttttggaaagtggaaatatttgatgaacataatcatatacttccaaaatataatcataatagctatgaccatatgccatgttagcatatgcgctatgatccacattgggcataatcacagctaatttgtgttcattcgcatacctttctatgcttgtatatctcatatatgtcgtttcatcacttgataatccatgtaacaacattaaagtttttaatggtttagcagttgtatcgttattaaagaagctttgatcttccggtaaaatgactgtcaaattttgatgcataccaattgttggtgaatgatagtttaatgaaatataagccatacgtcatgacccctttctaattctactttatcaacattttacgcttaaacaattcactttaaaatcattttcaacaaaaaaaccgaatacaaatgtattcggcctaaaaaagtatttacgctttttctttatgatcttgcttgcgttttctaaacaatagtaatgatcctaataatgccatcattgcaccaaataaagttgcatttgtgttttcgctcttatctcctgtttctggtaaagcatcagttttgtgttgttttgatgccttattagaatggtttacttcacctttaggatttgatggtgctttctgttcattatttggtggtgtaactcttgaatcagagtcgctatctgagtccgaatcgctatctgaatctgaatcgctgtctgaatccgaatcactgtctgagtctgaatcactatctgaatcggactcactgtctgagtctgaatcgctgtctgaatctgactcgctatctgaatcggagtcgctatctgagtccgaatcgctatctgaatcggactcactgtctgagtctgagtcactgtctgagtctgagtcgctgtctgaatctgactcactgtctgagtctgagtcgctatctgaatctgactcactgtctgagtctgagtcgctgtctgaatctgagtcactatctgagtctgaatcactatccgaatcgctgtctgaatcgctgtccgaatccgaatcgctgtctgaatctgagtcgctgtctgagtccgagttgctatctgagtccgagtcactgtctgaacctgagtcgctgtctgagtccgagttgctatctgagtccgagtcactgtctgaacctgagtcgctgtctgagcctgagtcactgtccgaatccgaatccggatctggttctgggcttggctctggatctggcgttggttccggatctggttctgggcttggctctggatctggcgttggttccggatccgggtctggacttggttctggatctggcgttggttccggttctggatctggacttggttctggatccggcgttggctccggttctggctctgggtcaaccggtggccctggagttggatctttcggatttactgctgaatcaccatcagcacttccaccaccataacgtacaacattctcattattccatccgaaaatactgtagtctttacctgtcgctgggtcaatattttcttgaataacctgtgttttcaagttttttccagtattatcatagtgaccttcaactaaaacgacatacgttttatttatatcaccaaaattaatacttgctacgtttggatgttcataaaaaattctattattaaactcattcgttacttctttaaggttagagtcatttgggtccgcatagtagctatctgataatttagatgtatcattcacttcaaaaattctcagttttgtatctttagcacttactttaccgctactttcttcgattttatcttggtaacctttaatatacacccacgtattacctaaaactcgttgcttagggttaacaaataccgtttgcttgtatgtgttttgacctgaagctgtatctacaccaataatttgagaagaaatgttcgcgccatttggcttatcaattcctgcaattggtgaactatagttataagtaatttgattgttaaacatttcatccgcaatattaatatttgcatcatatgttcctgatttaggtgcctttgctcggtctgtaaataatggtaatgaaaattgtccgttaatattttctttatcatttacataatctgtaaagacaaatgtatacgtcttagtcaagatatcatatgttgctttagctacaacatcgccattcgtacttttaatatctgcaattggcatcgtattatttgaattagagtaatccacgtctccattaccagttaaactatctggtaacttcgctgtaaaataatcccctgatttcactttatctgtcactgtaaaatttgccgccataaatgtgttaccactttggttaggatcaaatgtagtcttttgcaactgtaaattacttgccgtaactttatcatttacatttgtacctttagcatcagcagcatttactacaggttcagcaactgcaagactacgtacagctctcgttctaacacttggtttactagttccttgcgcattggaaatcgtttgtggtgatgattgtgataaatctaatgtttgaggatttttaagctcactgtttgttgctatgctattagcatcattcgttgttttattatctacttgagaatttgcttcttgaggaacagtttgatcttgcatttttgcagcagttgcttgatctttaattgccgtcggttgaggtgtttcatttgttgaagctggctctgttgtagtggtattgctcgtttgtgtagacattggttttgctgtgctatctacattcgcactgtttgtgtttgcactaatatcagatgtatcattagccgttgtatttaattgaggtgtttctatcatattatttttttcggaatctgcacttgcattattttttgaagattgcgttgtatcgttcgattgttctgaagcttgtgcttgatgattgcctatcccaaatagtatagttgcccctactattactgatgtggtacctactgtaaaacgtctaatcgaatacttattctgcttattcgacaaataatcaattctttttttcaaaaatattaccccatttcaatttctagattagtctaaattgtataatgaaataagaattatatcaattgcttttcgaaaaaaattacgtaaaatttgttttcttcctatttatataacttaaaattttctgttaactagcaaaaatcaatatactatttttacactattgcaaatgttttacttttcaaaaacttagaagttctaaatttttcatcaccttaaattttactgtaatttcaacaattaaatttaactaacattttaaattattcatcatgctaacaaaaaaggcctaacgtataaatgtacgttagacctcatgttcaacttattcattttacattgtatattaatcacatacatcattgaataaatgtttgcttactaaccaatttttatgatctttaacaacaagtttttcatctttaagttcatgaataatatgaccagctgtttcccgggaaatcccagccatatcactcatgagttgaatagttaaaaactgtttgatttcataaaattcatcttgatcgtatcctactgtctgacatagatggcataacaatttgataattcgatctttagcaaatttacttgttaatgccatgttatagttcatgtgttgttgctcattatcatttattaatgcaaaaagtgtcaaaaatatatcatcattagctttgcacaaaaaggccatcaattctctaggcaatccaagaactgtacaatcggttaatgctgtacacaattcgttaacctctttcggatgaaataagttactgattggaaataatacttgctctttattaaaataacgatatacatctccattttgattgtaatgttctctaataatgttaccttcaattaaaaagtaaatattgctactttcttgtggcgaaaaataaataacttggcctttcgtataatgtctgacaaaacattcactttgatatggttgtaatatactatatgggatattaatgtaatctgctaatgcctttagttcatgttctaatttattatttctacccaaaataaagttttctgtcataagttaaactccttcaaaccttgcaaagtgtcagcagacaactttttcatttgaatcaacggagaaacatatttaatgttttgtcgcgtgataaagtgctacatgtgaatgtgtgtacctttattaccaatcaaagcttcgtatgcctgctctaaattggtaatgataacttttttgttttccccactttcaacaaatcgtatcgcagcttctatttttggcaacatcgatccttccgcaaacttaccttgtgctgcgtattttttcagtgttgctacatcaatatcatctatttgttgttgattaggttcattaaagttaataaatacattttctacattcgtaagaatcattaaggtatctgcttcaatcagcgttgctaatttctcactagcaaaatctttatctataaccgcttcaacaccttcataggtattttctttttttataactggaataccgccacccccgcatgcaatgacaatatttttaccgtctgctaaagttcgaattaactggtgttctagtatagattgaggtagtggtgacgcaactacttttctataaccacgtcctgcatcttctttaaagactgagtctggctgttctttttgtaattcttcaacttcttctttcgtataaaaaggaccaattggtttagttgggttatcaaatcgtggatcatttttatctacttccacacgtgtaacgattgtgcctacagttctatcactattcatttcagttaaaatgcgattgatttcagtttccaaccaatagcctatcataccctgtgacattgcaccacaagtatccaatggcattgccggcgttgtgtcactgttcgatttagcttgttggattaataaacttccaatttgtgggccattaccatgtgaaatgacaatacgcgctggtgaatcaaataaaggtttaaggttttgcatcgcacgtctaatagctgtttgttgtgcttcagctgttgcttcttttgtctgtatcgcattaccgcctaatgcaatgacaattttctctttcatatttttgtcgctccttttaaaaaacatttatcgctcccatcaataacttaattaacccgataactgcaagtacgataataatcataaaaagaatatagtctgatttaatcaaacgtgtctgattattcttttgaacgattgaataaacaagaagagctggaatataaagtaacatcgtcaataataagtaattgatacctgctgcatatataagccatatagcataaattgaggctatgataccaatcgtccattgtttagtagttgcttgctgtcgatgctctaaagtgtatttaacttggtaaaatgcactgaacatgtaagggtataaaatagcacttgatgctagtgaaaatgcaaattgatacgcactctgtgtaaatagcatacttatcaaaaataattgtactaatatattggtaataagcagtgcatttacaggtgctccatttttattttctttagcaaaccattttggaaataatccatcttttgcaacaatgaaaggtaattcaccagcaagcagtgtccatcctaaccatgcacctagtaccgaaataattaaaccaatatttacaagtgtagatccccaaccacctacaatagttgcaagcacctgtgccatacttggcgaatctaattgagaaatatgattttgcaaaatcacgccttgagctaatacagttaataagaaatagataattaaaactgatataagtcctataaccgtggcactacctacatcttttttatttttagctctactagaaaaaattactgcaccttcgataccgataaacacccatactgtcactagcatcgtacttttaacttggctcattgtgctcgcccaactaaatggcaatacaccctctgacgtcataccgaaaaagcctgttttaaaagtgtcaaaattgaatgcaattatcatgcatatgattacaagtaaaatcggtattaactttgcaacagtaacaatactattgataaatgctgctgtttcaacgccttttaaaatcaagaaatggacaccccagagtagtaacgaggcgacaataatacttggtaatgtgttgcctcctttaaaaatcgggaaaaagttacctactgctgacatcaatagtgttgcataggcaacattgcctaaaaacgctgagaaccaatatccccaagcactgataaagcctacaaaatcgccaaatcctgcttgagcataactataaataccaccgtctagctccggccgttcattggttaaattttgaaatacgaacgctaatgaaatcattcctatagctgtaataatccaaccaataataatggctaatccaccggctttaccgcccatatcagacattatattgaacgcaccgccaccaatcatggatcctataactagtccaattaaagaagatttactgagtttgttatctcctgattcgttcatattcatttctcctttaataccaatatgaggtgtctgtacatgacacttatatcatcagacacatcatattcatatcgttccatttagtgattaactccccaatgttgctgccattactgccttaattgtatgcattctattttcagcttgatcaaacacttttgaatgttcacttctaaagatttggtctgtaacttccatttcagctaatccatatttttcataaatttcttgtccataaagtgtatttgtatcatggaatgctggtaaacaatgtaagaatatcgttgaatctttacctgttaaatcaaacatctgttgattcacttgatagtcttttaataaattaatacgttgttcaaattcactttcttcacccatcgatacccaaacatctgtatatatagcatctgtattttcaactgcttctgcaatattatccgtaatcatgactgaaccaccatattgactcgctttttcttttgcaatatcaacatatgcctcttttggatttaatgatttaggtgtacaaattcttacattaacacctaacatagcacctgctaccattaatgaatgcgcaatattattacgtccatctccaacgtaagttaagtttattccttctagatatccaaaattctcttttattgtcataaaatcagctaacatttgtgtaggatgccaatcatctgttaatccattccacaccggcacaccagagaacttcgctaaatcttcaacagcttgttgtgaaaaaccacggaattcaataccatcgaacattctacctaatactttcgcagtatcctctacagattctttttttcctaattgaatatcatttttccctaaaaattctggatgcgcacctaaatcaatagacgcaactgtaaacgctgcacgcgttctcgtcgaattcttttcgaatagtagtgcaatatttttccagataagtagtgatgcttaataccgtttttcttatactcttttaatgtaattgcaaaatcaataagtccttcgaattctgctttggtaaaatcactttcttttaataatgatctgccttttaaatcatacggtttttgaatttctgtcattattttcaccctcgtttctataatttattacgttaaatgtcttctctgaatagtggttgactcatacatctaggacccccacgtccacgtaccaactcgctaccagatatttcaatgactttaatgcctttctgtctcaataaatcattcgatacatagtttctatcgtaagtcactacaacacctggtcttatacataatgtatttgagccatcattccattgctctctagcaccatcaatgacatcaccatttcctgttggaatgaattggatatcatctatacctagtacgtcttctaaagtatcttttaaatgactagattgtttgatggcaatatctttatttacgtcatcatattcaataataaatatattcatattgccttctgcctttaaaatggctgaatgcattgtaaatttgtcataatctatcattgtaaatactgtatctaagtgcataaatgttcgactagttggaatttcaattgctactacttttttaaacgtcgcctgcggattttcaaaaatacgtcgcgctaacttttcaatagcttgtgcagatgtacgttctgaaacgcctatagccaagacatctttagataaaacaagttcatcgccgccttcaatattgaatgggcaatctcgatctaaccagattggaatattcgcatctttaaatctaggatgatgctttacaatatattgaataaatattgattctcgtcgtcgtgctctccagaacatccgattgattgttataccgtgtcctattgaggcttgtggatctctagtaaaataaaggtttggcattggatctaaatagaatggatatttatcatccatatactctactagatgtgtgcatttcggattaatttcttccttacgtacccctgacattattttatctacaagttcttgattagaaagtgtcgcaaataatgccttaatttcttcttcatgacctaatattgtttttttagactctgctaatacatcatcaataaattcacttcttacttgaggattttcaatactttcagctgctaacttctcaaggtaaagtacttcaacaccctcttctcttagcacctgtgcaaaatggtcatgctctttttgagctacttctaaatatggaatatcatcaaatagtaatccatctaaataatcaggtactaaattttctaattcttttccaggacgcttaagtaacacagtttttaaagctccaatttcgctatttactttaattggaccatctgtcatgtctatttcctccttttatctttgaattcatttagagtatagacaatcttcaaacgcttacatgtgattatattcacataaagaaagtcgaaaatttcatatctttttgttatacaatacataataatgggtttttatacataaataaaggcgtattgggtcaaaatatacatttttcattcaaaaatacccataaaaacatgttgtataaagttttttatacagtcaaatgaatgactatgaattctttctttacataaaaaaacgcgtacacaagttaatatttggtaactaacttgagtacacgtgatacgaaacaaatttttattattcatttgatacatgtctatttaaataattttgcatatacgtattctgccatatcatttgaggcagttaagattaatgtagtgtcgtttccactcaccgtacctaatatttcttctatatttagctgatcgataaaatagtttatgccttgggcgaaaccaggtgaggttttgacaataatgtatgaaccattgatgattgaacttagaacttcatgttcacaatagtgtctaaacttttctctcatctcttgttctgtttgattattaatagctttataaatccatgtttcacaatcgatagggacacgatatatattaagttctttcaagtctttagcaattgttgttgcactatatcttacaccaaaatattcttcaatatatgaaatgatttgttcttttttataaatcttatgctttttaactattgtagaaacaatttctaatcgtttacttttcttcatattgtaaactcctttggtagttacgtttcttgtattaaaaaataaattcatgcatgtttcatttataatttaacactttgttttgcaaaagataataaaaatacatgtaaattttttgtgacaacttttaaaatgaattttgtattctaagtcagcatttaattatcacatatttactactagtaatgattttagactgccgagtagtctttcggcagacaaccctcacactcctctcatctaattacaaaaagagggtacacctacaaagtcaattatcaatgtaggtataccctatatataagctgtatttaaaatttaattatttataagtgtttaacattacttcttcttgtttatatatttttactccacgcctacttcattccatgctttatacacctgttcagctgtttgctcgtcatataaatctttagccgcttggtataatgcatctttacaatctttgaagtttgaattacttgttaagtattccgttaatgctcggtagtaaatttgttctgatttagatttccctattgcttgaatcacgttataagctgctttatttggaattccagaattcgtatgtacgccaccattatctttttcagtgaatacatagtctttcatatgagctggttgaccaaattgttctggatttgacatgctgcgtaaagcgtctccctcttttccaggtgtgtagacatcttcacccattaagaaatcctcgtcatctacaaagtatccaaaaacatctgaaaagctttcatttagagcgcctgactgatccttatattctaagttcgctgtctcttgtgtcacaccgtgtgttaattcgtgtgctactacgtcatttgcacccgataaacttgtgaatgtgcgaccatcaccatcaccatagatcattttgtcaccgatccatgcggcattatttctgttatcttgaccactgtagttattaacatgcgttaatgaaataattggactaccttggttgtcatatgattcacgaccaaatgtatctttgtaataatcatatgtttgtttagcgtaataatttgcatctacgccagcacgttgctcatcttttacgaagttttcatcttcattagtaatcaatgttgcttgacctgtttgatcattaaagctaaatgctgataatttaccttgatgcgttaaatcttctaggctaaatccaccgtcaatactattgatattgatatcttttgtatcgccaagtacaccttttcctttaccagtttctgcagcttctttaactaagttcattttttctaaaatttcgccagtttgagcatcaattttaactttccaatgtgaaatttctggtgtcactgtaattaactcaacattataaacgtatttattactgtcaccatcgatttcaactttgttttctttaatgactttatctttaagatttttcgctttattcttatcaatcttaactgctttaaatgctttgtcggctgcgtcatctttacttaatgtcactttattcgttggctttactttcttcgcatcagtatccccattgattaaaacgacttttcctgatttgtctgcgtgtactttcacttctttgtcaggtgcatgaacaccatcaacactcggttgcaatgtgtaatgcgtaaatccttttttatcagtttttacatcagtaacagcgtaatcttgataaatattttttacattttcggatttaggcaattcttttaatgctttgaccgcatcactcttttgagtcacctcaaatttaatatcagaattagctggtttattgtttgaatcaatcgctaatgctgctggtgataaagtgctcaacaaggttactgctgccatacttgtaaatgcatatcttgaaaatttcctcacatttcattcctcctgaaatcttaaaaacagcttataaataaaatattaatttaatttttcagaaaagtaaatgattatttctatttatttcgatactttttgttcgttgattttatttattgattcttttcttttttaaaaatgttatctgtggctaaataaaatttttaaaattgagcttaattatattttaaaatttatcaaggctttatttttgtgaaaatattaacaaatacaaaatagtgctctatacacttaatcaatgcttgaaatatgtatactgactacttaactgtgcatgattaaatctatatatttcaatatcatggagacaccaaaactaccatcatataatcaaaaaagactagaatgcggtatcactcctcacactctagccttaatatgctattattttatttacttgttttgtatggtgtatgtccaactgttacttcgacaactctattatgatcaacgacaaaccagattcctaatgtctttttagcattttgatagtaaaaaataccgctatcagcttcctttgttttaccattttcttttttcaagtccttgccataagctttttggatatcttttaatgaaatattatttttaactacaaattgcaattgacttgcttcgattccttttgcagaaacacctttaaaagtttgatcatatttctctactttttttatcgtattcgttttagctaatttaataccattgaatttcacgttatcatacttaatcgcgttaataaaattcttatccagaataaaattagcattattaccaatataaccattataagtataatatggggttattgctgcctgtgcctgtttacttgttggcgccgaattttcaacaactgttactccaatcagtgtgcccaatgctaatgttgctgctacacaaactttactggttttattcataattatctctcttttccatacaaatattttattccttacacttttattataactttttcagccataaaaatactaatgattatatttataaatacataacagttttgttatactaattgaagtacacaaaaaaacaatgaaaatattaatatcgtctaattttctaatatttattttttaaaatgattatggcaatattgaaataaattatttagcttcacgtatcgactacttttcattaacatggaggcgttatatttgaaaaaacttcttattaccatcgtaattatcgtattaatcggagcacttggattcgcaatttatgctgcaataaatcattctacatcatcaagtaataaccaagaacaagaaaataaagctacgcataaaaagacagacaccgaagaaaatgatcaacaagatgatagtgcagacaaagcagataaaaatcaaaataatggcaataacgttactaatgacaatcaaccatctttaccgtcaaatgttcctaacaaccattcaaaagcaccttcgaatacgcaaccagctcagccaaaagactcaaattcaaataaaaataatactcacggtggtggtagtcaatcgtcaacaaacaaccaaaataatcaacaacagaacacaccacctgctaataaatcaaataataccaatacgtcttctaaacaaacacctcaagtagaatcacctaaaaattaatcatttacctgatacgtccacaagtatcaggtacataaatccagaaaaacagcagtatgatatttttctatttgaaatatcttactgctgttctttatttgcataattcgcactctgttaaattcatataaaagttcgctttaatgtcattgacgtatgtataagctctcatgtttaataatattaatacacctttaaaaacgcttacacggaaaatttagaaaggaggtacatgttaaatgcttgatagacacttaaaactactccagttttttattaaaaatccatcaaagcacattagttctaatgaaattgctgaacatgtcaatgtttcaaaccgcacagttcgcaatgatatccatgttatcaatagcaattttatggatgatatcatcgtaagtattaaatctaaaggatatcaattaaatacatcgcagtataccttagaaacgataactgaacgttacacgcatattcaatcatataaagaaaaactattattatctatggcgtatcaactgctaatgcacaataaatcgcagacattgcaacaactagagcaagattatctattatctaaaactgtgctcaacgactatttcgttcgaattcaacaatggtgtcaaaaatttaatatcgctttaacaattaagaaaaaacaaggtattgtggtcgatggaacagatagtgatatcactaatgccatcatccatttaaatcaattatcatcagggcatgtacatgttgaagacctaattttaaatgaattacctgattcacaccaaaggatgatttcgcatattatacaagagacacttcaacaacatagtattgaaacaactgatattcaaatacaacagcttttaattcatctcattttaatcattaaacgtaagcaatctttaagtgagctagacacgttaaaccacgattcaaaattgatatctcaatcttgcattaagcaaatcaatgaaagattaggttatgacttgaacgaaaaagtaatcaatatgttttcattctttattggttatcattttaataaactcgatattggcatagaacgtatatttatacaaagttatattgatcgcttaatcgaattgatgcaacaacatattcatgtacctttcaatgaagattcgattttacaacaaaatttatataatcattttagtaaagcatatttacgtatcactcaaaacatttatttaaacaatcctttagttatagagattaaaaaactctatccctttgtgtttaacacactttttgaagcgattgataaattagcaattgatactgatatagagatgagcgaagatgaaattgcctttttaacaattcattttcaagctgccatcgagcgtcgtaccaaaacacaattaaatgtagtcattgcttgttattatggtctaggtgtgtcgaattttttagaaactaaaataaataacttatccgaagagttgtcagtgataaatacgattaaactagaaaatataacacactatcactttgacaatgtagacttattaataacgacccatgatattccaaaacaaacgctaaacatacttcctaagcacctaacgattatcaaggttgcaccattattttctgaagatgaccgtcacaaaatcagacacgttgtgaagcaaaagcaaaatccggttcaagcacatcatcatatggacactgtcaatttccttgtcgtaaatactgaacaaaaaccacgacatactgtgcaaatttttgaagaagctcaaaaaatattacaagcacatcatgcgattgtagaaggatatatcgaatcagctttagagcgtgagaaatcatcttctacatacataggtaattttatggcgattcctcatggagatcctgaaaaagttttacaatcacatgtgcttatttttcgcacaaaagatgtttttccttggcgacaacacgatgtcaaacttgtctttttcttagcgatttcgcataaagacaaagcttttacaaaacaaatgatgcaattaattgctaacttggatgatgattcagtgaaccatttatgtagtttagatgatcatagtttaaagcaacagttatttgaatacttacaagaataattgccactagtaacggtaattattcttttttttagtatcgagaatacgcttacaatatagaaaaggagatgattttatgaaaattgtagctattacctcatgcccaaatggcattgcacatacatatatggctcaagaaaaacttgagcaggtagcaaaagaaatgggtgtggatattaaagtagagacacagggcggtgttggtgctgaaaatgttttaactacgcaagacatcgaagaagctgacggtgtcataattgcagctgataaacaagttgatctgtcccgatttgttggtaaacggttgattaatgaaaatgttcgcgaagggattcataatccgagaggcctaattcaacgtatcattaatcaagatgcgcctatttatcaatctgaaacaaattatcattcgagagatcgcgataagtctaaaagtggtattcaaatggtgtatcaacatttaatgaacggtgtatcgtttatggttccttttatcgtagttggtggactccttatcgccatcgcgctgactctaggcggtgaaacgacatcaaaaggattagtcatcccagatgattcattttggaaatccattgaaaacattggtagtttagcctttaaatttatggtcccaatcctagctggatatatcgctgttagtatcgctgacaagcccggtctcgttcctggtatgattggcggcgctatcgctgctgacggtagtttttatggcagtgatgcaggcgcaggatttttaggtggtattgttgctggtttcttagcaggttatatcgcaaagtggattaaagatattaaagttccaaaagcaatggcaccaattatgcctatcattattattcccattatttcatcggtcgttgtaggattgatatttatatttttaatcggtgcaccaatttctaatatttttgaggcattaacaacctggttaaaaagtatgcaaggtgctaatattattatacttgcgatgattataggtgcgatgatcgccttcgatatgggcggtccagtaaacaaagtagcatttttatttggctcagcacttattgctgaaggtaattacgccgttatgggtatggtcgcagttgctgtatgtacaccaccaatcggtttaggtttagcaacgtttgttcaaaagtataaattcaatcattctgaaagagaaatgggtaaggcttccttcactatgggactatttggtattactgaaggtgctattcctttcgcagcgcaagatccattgcgcattatacctgcaaacatcattggtgcaatgattgcatcagtcattgcagccattggtggtgtcggcgatagagtcgcacatggaggtccaattgtggctgtattaggtggtattgatcatatattatggtttacctttgcagtgatagtaggtagtcttgtcacaatgattactgtactattattaaaacgcaatacaccagttatagcagtagatgcaccagcgcaacacacgcaacttcatgatacagatataacacaacatgatacagaggttgacaatgtagataacaccgcgaaacattcacatctcaataaaccttctcatgtttttgatcaacaaactatggtaattactgatcacgacatgtctcgaaacgaagcaattgatatgttgattcataaacttaaaatttgccgttatgttgagcacacatcgcatttaaaaaatgcaatcctagaacgtgaaatggagtctacgacagctattggcatgaacgtggccattccacatgcaaagtctgatgttgtaaaacaaccgattgtagctgttatgaaaaataatcatggagttaaatgggagagcctagatggtagtctacctcaattgatattcttaattgccgtaccaaacaacagtcaggatacacatttaaaaatacttcagcgcttatctaaagcgttaatgaatgatgagacacgccaatcactaattaatgcaaacagtactacagaaatttacaacttattaatgaaaatatagaggagttttaactatggcattatttttacaacccgtttttaaagacagaatttggggcggtcatgcattaaaagcatttaactatgatatccctaataaaacaactggtgaatgctgggcaatttctgcacatccaaatggtcctaatacaattatcaatggtccatacaaggatatgaccctagatcaactttggtcacaacatcgtgaattattcgataatgattcacgagatagtttccctctgctaactaaagtattagatgccaatgataaattatctgttcaagttcatccggatgatgattacgctttaaaacacgaaggcgaactaggtaaaacagaatgttggtatattttagatgcagccccaggtgctgaaattatatatggcgtacatgcacataataaacagacgttaatcgacatgattgataatcatgaatttgacagtcttttcaaacgtatacctgttaagcccggtgatttttattatgttcctgctggcactgtccatgccattggttcgggtattttaattttagagacacaacaatcatccgatacgacataccgtatttatgactatgatagacgagatcaaaatggtcaattgcgtgatttgcacttagagcaaagtaaagatgtgattgaattaggcaatcatgaaccaaatactactcctataacaactcacatcgacacacacactgtaactcaatttgtagataatcaatattttgcagtatataaatgggatattcatggagatttaaaattcaataaaccacatgcttattgcttagttacaattatcgatggtactggtactttaacagtaaacgataagcactatgacatccaaaaaggttctagctttattttaactacggaagacgaggatattcactttgtcggtaatattagtgctatagtaagtcatcctggataatagcaatgataacacccgtcccataaaagacagaaattactatctcttctgtctaaaaacataaaaatccacacattaaggtgatagaaccctagtgtgtggatttcatttttattctgtaacgttactttggtcaactttttcagatacgcgcttcatcaatggatctgttacaggttttaaaattaaacctacaacgaagaatcctatgccaaataacgttaatataattaattttgtaattaagatttccggaacaataccgcctactgtttcacgtaatgaatcaatggcatacgtaaatggtaagtatggcgaaatgttttggaaaaattgtggcgtagtttgaattgggaatgttcctccaccacctgcaatttgtaatacaagcaatacgattgcaatggctttacctgggttaccaagtaatgatacgcacgtatatacgattgagttgaaaataatcgaacagaaaatcgttataagtacgaataatacaggtgactcaacccctgcttttaggattaacaaatctccaaccgatacaatgagtgcttgcaacataccaagcattataaagaatcctgccttacctaagaacacttgtcttgtcgttaagactgactctagactcttatgtttattatcaaccgttaataaacttaccatcaagagtgcacctacccatactgacagtgcagtatagaatggtgtcatacctgaaccataatccttaactgggaaaacatcaacagtcttcttattaataggatttgcaataatacccgcttgcttcttcaaatcattcttaagcgtgtcgattaatttgtcgactgcatcatctttgtctaatttcttgaaaattttattcgcttttttcaaatctttttcaacatcaggcaacttattttgagaaaaatcagctaaatctgataaagcctttttcgcttgtggctgatttttatttagtaatcctaccgcttgatcataaccatttaataacgttggtaaatttttattcacacttgctgtcgcattggttaaacgttgctccaactgtggtaaatcgttacgtacaaagttagctgctttcgctacatcacttttcactttagggaagtttgcttgagcatttttaacagcactaatgtattgttgttcaatacttggtaatactgtttgtaaacgatcgatacgtgttttaccattttttaaaatagattgaccactgctgatgacttgatcaattgtatttagcttagactgaacattagacaatgccgtttgccctttattcaattcatccataatacgttgtgatattgatactaaagagctgttaagatcttttttaacataatctctaaatgatgataatgatgaatctagttttgacagttgatctagtaatttagtagcttcagcagttcctgaactaccattctttaatgcattgcttaattgattaactaaccttaatgattcattaattcgattattagctgtctttaccttatcaatttcttttgataaattaacattttcattcttctcaatctctttcaatgtatcgataaattgttgattgtattgagttgtgtattctaaaccggacttaacattatctaaagactctctaaaatcagaaggcttgtccgatgctaaaatgccatacgaaatattacgtaatgcctgactatctttttgtgcggctttcgcttgggtatctaaattatttgataatgataataaagagcccgttaatgccgcttccattgatttaacatctttatctgtaatgttttgtgtgttctcgttagctgtgctgacttgtgttgttgttatatctgcaaaactttgaccatctttttttccgcttgtactttgtggtgtagtcgatacaggcgcattattactatttggtgcagtattttgcgtaacattactatttggtgcagtatcgccacttggtacacttggtggcgttggtgctacaccattaccagctgcaggtgcactatttgatgtttcgttgttcgccgcgctattttgaggaatctgttgctgatttcttcgatttaaatcttgcgcgcgtcgaattgcatcttgataatcaccgactctacttctaacttgtgtgacgaagcctttggcatcatttaactgtccattagcttgatcaataccttgactcgcaatgttaagtccttgattaattttagggaactgcgctggcacgtcatcagctgcaaaatttaacgctttttcaattttcggcatataattatttaaagctaatatcaacttagccttttcattaagttgcggaatagcaccattgacttcgtttaattttttctgagcatctaaaatatcacctttataatttcctagttttctaaaatcattcgcatatttatctaaatccgcttggtggttattcaaatatacaattttattcgcaaagtcattaatcttaggtaaagctttatctgctgaatataccgcattttttatcttgttaattgtcggcacattttcttcaatagttaaacctgctttgttagcttcttctaataatgctcgagttactgttttattaaattgttcattcgctttttcaacgacaactgacgaaccagtatctgttagcttagacgcaacagcgttaatcttctgattcaccttaaattctacatctgctttttgaggctgcttacgtagtgtcccggtaatttcatgtgtaaacttagatgggatgtaaatacctgcaaaatatttacccatttttatctcatgatcagctttctctctacttacaaactgccaatcaaagcttttatttttcttgagtgtattaaccatcgtattaccgacattaacttttttccctctgattgtgtcgcctttatcttcattaacgactgcgaccttgatgtgtcccgtgttgccatatggatcccacattgcccataagttaaaccaagcgtagaacgatggtaaaatagctaagcctgctaagataatccacacagctggcgtcttagctactttcttcagatccattttaaataatttaaatgcgttcttcattgtcacactcctatgtaggaattattcatattttttatatattttttgtaaattaatttatttttgcgttgtgaattagtataatcaatttactggaagatatttagtcgattgatacctatcaactattttcagcatacgataaattataacaaatcatagtttattatcacacttaattattatatttttcaagggagaatacgaaatatgcctaaaaataaaattttaatttatttgctatcaactacgctcgtattacctactttagtttcacctaccgcttatgctgacacacctcaaaaagatactacagctaagacaacatctcatgattcaaaaaaatctaatgacgatgaaacttctaaggatactacaagtaaagatattgataaagcagacaacaataatacaagtaaccaagacaataacgacaaaaaatttaaaactatagacgacagcacttcagactctaacaatatcattgattttatttataagaatttaccacaaaccaatataaaccaattgctaaccaaaaataaatacgatgataattactcattaacaactttaatccaaaacttattcaatttaaattcggatatttctgattacgaacaacctcgtaatggtgaaaagtcaacaaatgattcgaataaaaacagtgacaatagcatcaaaaatgacactgatacgcaatcatctaaacaagataaagcagacaatcaaaaagcacctaaatcaaacaatacaaaaccaagtacatctaataagcaaccaaattcgccaaagccaacacaacctaatcaatcaaatagtcaaccagcaagtgacgataaagcaaatcaaaaatcttcatcgaaagataatcaatcaatgtcagattcggctttagactctattttggatcaatacagtgaagatgcaaaaaaaacacaaaaagattacgcatctcaatctaaaaaagacaaaaatgaaaaatctaatacaaagaatccacagttaccaacacaagatgaattgaaacataaatctaaacctgctcaatcattcaataacgatgttaatcaaaaggatacacgtgcaacatcattattcgaaacagatcctagtatatctaacaatgatgatagtggacaatttaacgttgttgactcaaaagatacacgtcaatttgtaaaatcaattgctaaagatgcacatcgtattggtcaagataacgatatttatgcgtctgtcatgattgcccaagcaatcttagaatctgactcaggtcgtagtgctttagctaagtcaccaaaccataatttattcggtatcaaaggtgcttttgaagggaattctgttccttttaacacattagaagctgatggtaatcaattgtatagtattaatgctggattccgaaaatatccaagcacgaaagaatcactaaaagattactctgaccttattaaaaatggtattgatggcaatcgaacaatttataaaccaacatggaaatcggaagccgattcttataaagatgcaacatcacacttatctaaaacgtatgctacagatccaaactatgctaagaaattaaacagtattattaaacactatcaattaactcagtttgacgatgaacgcatgccagatttagataaatatgaacgttctatcaaggattatgatgattcatcagatgaattcaaacctttccgcgaggtatctgatagtatgccatatccacatggccaatgtacttggtacgtatataaccgtatgaaacaatttggtacatctatctcaggtgatttaggtgatgcacataattggaataatcgagctcaataccgtgattatcaagtaagtcatacaccaaaacgtcatgctgctgttgtatttgaggctggacaatttggtgcagatcaacattacggtcatgtagcatttgttgaaaaagttaacagtgatggttctatcgttatttcagaatccaatgttaaaggattaggtatcatttctcatagaactatcaacgcatctgccgctgaagaattatcatatattacaggtaaataagtattatattaaacccgtaaaatttataagtataaacaaggagttcggacttaaacatatttctgttcataagtccgatttcttattcaattaaacccgaggcattcagttcgaacgcctcgggtcattttatataaatatattattttatgttcaaatgttcctcatcatatccgtttcaattgccatctcacacattttataaatatgagcaaatgtacttattctcaaacattactgccgagctttaattgacgttatattaactataaactgcttttccatgactctacggattcaatgtcacatgagcgtgataaaatttgttcgataataaagtcgtgtttatcatccgatctatcaccaacagcatcttctaaaacagtaatataatagtctttatctacactttctaatgccgtgctcaatacagctccacttgtagagacacccgttaatactaaatgattaatatcatttgcacgtaaataaacttccaagtaactacctgtaaatgcgctaaagcgtcgcttagaaataatcggctcatcttctagtggtgctaagtcttcaagtattcgtgtagatgcatctgcttcagtaatcgcatatccttgagctttaattgttgaaaacactttattactcgaggagacatcattaaaatgcttatctaacactaaacgtatgaaaatgactggtattcgatgttgtcttgctgcttcaattgctctctgattcgctttaataatattttttattctaggtacactactcgctataccttcttgcatatccaaaactaatagcgccgtttttcgagacatcttcattctcctttacttgtgtagttctaagtcgttaaattcattataacgttaaaatgatggacaatctattcattgcattttgcatatacttcacaataatttaagagggaaataagacgtcttatatacttaaaaaaatatatagatgctcttcccccaatataattatgctttatttttcaacttattgcgtcgtgataaccaaatcattagtacacccattgcaccaacaattacagatatcggcaaccaatgttcttttatcgtttcccccgctttaggcaaagatacattaccatcagcatttaataatccacttaacaatccattacctttaccaagtgttaacgtcttttctggctttggtgtgggtatatctggaatactgtctaataaatttgatccttgattcattaaacttgctaacttatttaaatctgttgttttcccatttttattcaatctatctagtaaacttggacgatttactattggtgataaaacatagtctatatctttttttgtttgattgagtctcttttgtaaattcaataaatcatccgctttaccattcaatgccgatttaactaaattaaaaattttattttgatctgtttctattttagtaattaaatctgccagtaattttgccttttgtctttctatacgtgttgctaaaatcgtttcaattgcttgttttttatctttggcattattcaaaattgcttttaatatatcatctgaagacgtgtcgccagttgatgcaaaatgtttcttcaattggtcaacgatttggcgatttgataatcctttattcgtccaatctttagccaatttatctgcttcagattttcctaatttcgtttgtaaaatttgagaaatcaatagcgacttatcttgtgattgatcaatcaatgacgttaataaatcatcactcgttgtcagagatagttgatcaatatgacgagtaatttgatctgcaatttgttgatctgttttaccatcaacacgtatatcttttagaattttatctgcctcgtctttattaaatatactttctaaaatgttttgtgtagcatgctttttatcatcagtacgtgcaagttcttccaaaataatatttcgttgactttttatacgctctttcgtcttatttacttcgctcattaagtctgatttttgatttttaggaagttgtgtatttgcaatacgttgatctaaagattgtaatgtattcagtttatgatatgtgtaatgatgcgttgaggcattacttttagccaatttttcaatcatagcatgattaattttatcgcttccttgtaatttatcagtgagtcgattactatggctttgattctcttcatttgaaagaaatttatttaacacaacatgtccagaaccatcattatttggcgttttagctacttcatgattattatctgttgtagacactgctggattttccgatgtatctttcgatgcatctttcgatttgtgtatttgctgatttaaatggtctaagtcttctaacgccttatctaccattgcttcatcatttttatcatctttttctccatgttttgttgtagccgtttgtgacatatcatttttcattgcattaagatcgtcctcgccactttgttgaccactatcaacctttgaagaaacctcatttaaatctttaagcaattgatctaatttactgtctatatcactttgaccgttcatttcaatttgagagcctttattgtctttgctatccaactcattagctcgtttaatgatttcatctatttgcgatgctgttttcgcttcatttagttgtgctttataatgtgctttagatgaagccgataactgttttaattgctcaatttgacgatttgctttgtcaactttgtctaataaatcttgcttagataatatctcttttgaaatttcagtatcattttcagatgcagcttgggcatcgtacggcaagatattcgttaaaatgatacttgtcgccatcattgtcgaacacgataactttacatataattgaaacggtttccctcgatatttagccatcaacatactcctttctcacttacttccttaaaagaattacatactattatatacctgtttacaagaaatttacacttatctaactagttattgttgttagtaaatatccacttattacttagcttatatttaagtaaacaaaaaagcatgacgtaatatcatattgtccatgtcgctaacaccatattacgtcaaatcttttatattaaatgatgctttattttagactgctttttctttttagctttcgagcgcctgtttaaaaacttgctcgaattgttcacgcgagatttcgtgtgcatgtgctttttgtgctaataaagcatctcgaaactgttgttgatctttcaaactttctaacatttgtattaattggtctttactttccattgttatctcatcattatgctcaaataagtgctctgatagtgttactttagcatggtgtgctgtttgacgataacctaaaatcaacaactcatagtcaaacgcttgttccaccgcatttaaaatttcattaccctcattgatatcaagataaatatcacataactggtatagttcatttaccctgtctatattaatagatgggtataagtgcacattagcatattgatcaagttgcattagcttatcagacatctctgtaatagcagcgatgtgaaacttaaaatctggtaaagtttcaaccaataccttgatgttacgaagttgatccgagttagttaatattacaatttctttagtatatctattacgactacgataattatatagatatccgccttgtaaaatacgagattgaacctttgcgtctgctatattgagcatcgtttcatattcgtttttatctggaataataatattacaatgtcgtttcatatcacctttacacatcaattgcatatttcctgggacattaccatcgcactgttcttgccataccaaaacatcactaccatttgatggcaaattatataacactgaaaatggtagggctagtgagttaataacgaaatgatgttccgtaatttcaagttgcttgataaaaaataatacgaatgcgagctttgaagggaaaaagtaagacttcccttgccaatccaatatgacatcagatgttacaaaattttcataaatcacttctttaccctctgctgtcatatatttcttcaagatcgctttacgatttaaatcgtaaacagtttgtgcaaatttaataccattcttagaataataatcgacaaatcggacacgttgttggtcatcaaaccattcgacacgactaacaattctagggcgctctccactttgataaaatattttgcctcgtagacgtcccatatcattaattgtagccgaattgttgttacctttaatttcccaaaaagctggtacagtaacctgattaaaaaatcgtggtttcatattttctgtattatgattatctgcaaaaaattgatacggtgatataacatcgtccggtaaaaagccattgtcattgagtacaattgttaaatcttcttccaacttactggctttaaaagactcatataactttcgtgaatgatcgttaaagtaatcaaataatttaatcatacagcacctcttgaactaatgtttcccattttaaaataatatcttgagtcataaattgctgtgccacttcataagagatgtcatgtggtgtctggggaccatcgttaaaatacattacaatggcatgagctagttttgcgacaacatcatccacactatcttcatcggtatcaaaaggtaccaagtagccattttccccatctcgaataaaggttgggttaccataattcacatttaatccaatcatacctagtcctgagcctaccgcttccattagtgttaatccaaaaccttcgctagttgatgcagaaagaaataactcataatcagtataaatttcatcaagtttaacatgccctagtaaacgaatataatcttgcgcgcggtgtgtatcaataattttacgcagtcgcgtcttctcgctaccttctccataaatatcaaatgttaattttggcacttgtcgtttagccacgataactgctttgacaagccaatcaatatgtttctcatttgctaaacgagatgcactaatcatcgcatatggctttcttgataatgttggatatgataatgcatcaatgcttcccacaggaatagtataaacacgtgggcgataaccttgatattgctcaaattgtcgacaaaccatatgattttgaatatctgttgctgtaataaagaaatcaatgtatttagcttttgaaaattgatattcataataattgttccatagtatatgctgctcactcatcatattattactataatgatcagcatgaatcacaacaccaactttactatcacctttatgctgcaaaacagcctgaccaatatcagaagcgcggtctaatatgacaatatcgtctcgggttaaattcaatcgttgtaaaaagtatgcaataaattccgttttgttatacaacaccgcatctgcaaacacatatatagagctgtctccatcaatatattcgttataagcgatggaaccatcttcattatagaattgtcgcatatataatttcgctttattatcagctggtgcataatactcagaaaatatacgtgtataactataaaaatctttacgtactaacatactattaattacaaattctgcacgatccacaatgtctttttgctcattttgcagataacatgttacaaatgatgatttcccattaaaatataggcggactatcttaccatttctttctctaaaactaatatcatgaccaagatcacgttcaatgtcatctaacgtgtacgttgttggtgctatagaaatatcactaaaatactgatacaaccaaataacttcttgatcttcaaacccaatgttttgcgttaatgtctgtatgttctctgactgtataaaatctaaaaacacaaatttagtgtcttgatttgtacgtctcaataatttagcacggtaagcttgtgcatattcaacaccgctactcgcccagcctataccaaagtttatattatatattgtcatgcgctaccccttttcatttatggaaaatgtataactggcataccctctttatcaaatgtaatcatgctttgacaaatatttttcaccattctttttttgatatttcgtgtcataacttcaaatgaatctaatgcaactctatggtattcaaaaatagcgttacgttgcccattttgtcgttgattaacgcttgcttttaattgttgtaaatagtcgacttgttctaaccaacatgaatcaattgctttcaaaaagactttttgaacgaaaatattataataatatgcactttgcatgtttttacgattcaaagctacttgcttttcaaattgctctaataaaaatgtcactactgcttgcttatctttaaaattaacacaagccacatctttattaaattggaaacttaaattttgataaatatactcgacaacacgcgattttgttagcaccttttcctcatttacaaacatttcaaatacatctttagctaacgctttaaaatctcgattctcagcatcatctatttctaaaactcgattgcgttcctcgtatacaagatctcgctgtatactaatgcttttttcaaattcattagccatttcacgagctttaaccccttgttcttccgagatacgctgcgctttaactacaatttgcttaactttgcgattaaacaaactactttgcgataatcgttgtgcatctaatgaatataattgattattttccgctaaattactatcgctccatcgcttaactaaataatcatctagtgaaatatatatacaagatgatcctggatccccttgtctaccagaacgaccacgtaattgcctgtctacacggctattttccatatgctcatgaataataacagctaatccacctaatgcttcgacaccttcaccaagtttaatatctgtgcctcgacctgccatactagtcgcaacagtcatggaaccaatttgccctgcttcagctatcatctgcgcttcttttgcaacattttgcgcaatgagtaaattattaggaatatccatttggaataatactttcgaaaagtattcagccgcttcagcagttctcgttatgagtaaaaccggtcgccccgtttcatgaagttcaactatatcatgaatcatcgcgatgtttttctcatcaactgaacgaaacactttatctggttcatcgatacgttgaatcgctttatcagttggtacttgtacgactatttttgaatacaaatcaaagaactctgattcgcctaattttcctgtagctgtcatacctgaaaatgatccaaaaagtttaaataaattctggaaggtaattgttgccataacacttttatcagttgaaacctccataccttctttcgcttcaatagcttggtgaagtccagcttgcaacttagttcccggtaacatacgacctgtaatacggtcaattaaaacaatatcaccattatatacgaaataatcgacattagattcaaacaaatattgcgcgcgcagtgctagattaatattacgcactaagaccatcgcttgttcgctatataaatcttcaacattaaagtatgattgtgccgcttcaataccttgatttaacagccatatttcttttttggtcttcttcattttaaaatgcacgtcttcaatcaatgtatctacaaactctttcacaatatgaaatagatttgattgtaatcttggtgcacccgaaataactaatggtgtttgagcagcatctaaaatgattgagtccacttcatcaataataccgtaatttaattgtggtaaaaattttccttccgcactatctgccaaattatcaattaaataatcaaaaccgagacgtccattagttgtatatataatatcatgttcatatatattacgtttttcccctttttgatactcataatccacaatatcaacaaaacctaatgaagaagttaaacctaaccattcatataatggttgcatctcttcaaaatcacgcttcgctaaataatcattcgttgtaattaaatatgttccttttcccgaaagtgcatttaaatataaaggcatcgttgctgttaatgttttaccttcgcctgtttgcatctccgcaatgttaccttcatgcaatacaatcgctccgattaactgaacttctttaggatacatacctaatactctccagctcgcttcacgtgccactgcataagcttcaggtaacaatgtgtctagtgtatcaactcctaatgctaaacgttctttaaattctattgtcttttgttttaacgcatcatcagaatatgatttaacttcatcgctccatgtattgatgcgtttcactatttttctaatcgactttagtcttaattcgtttatcgtaacatctagtttatgtttcatttacttccccaccattcagtttcgatacatctaagtaatctaaaaatcgtactggattcattaaacgtgacatataatttagatggttgtcttgctcttctttaaaataaacctcgacatttgtatcttttagttcatgatttcctgggacatgttctttaaaccaatcttttaaatcatcatcttcatggcttgtacgatacactttgcaatctaaatgctgagcgacataagttgcaaaaacatttgactttgacccataactaatcaagttaatagcctttatggtatcttgactttgcaaatcattctttagttgcttaatattttcctcgatattgtcgtccatccaacgttcaacgagccaaacatgaccaaacggtttcaaaaaatcattcgaaatagttggataggcgtcagatggttctgcaataatgacattgatcctatcatttccatattggtcatcgcctatcttcgtcacccgcatgcttttatactctaaatcatcttgatgcgtcatctctgtaattgttaaacatctaaatataagactcgtcgatgctgcattcatcatttttattttataagcatagacttcatcaggatattgaatcgtaatactatttgactttacaatctcagtacttagttttgtgccatttttattataaaaaatgatgataaaatacactgaaccagcaggcgttgcatcaaaatcaaaatgcaatttataatgctgtcctctacgcaaaattggtaaacttggcgcacttttatattttgaaaattgttttaacatcaaccactcatgaatcggtaatccagagggcatcaaaggatttataaaagtcacttcaccatttgaaaatgatacttttgagccatacatgaatgtagtttgtgaaatataattccaagtaactttaaatgttttgtttttcagcatgttgaactctcccaaacttgtcttccaaaataatgttgtaaaaattaacaaaccaacttgcaatggtaggtgaatcatcattatgtcgcccaggaatactgcgattcatcactcttgcttggtgtgctgtcaatacaggtagtagctcttgaaatgcatgtggatcataatcatcatgttgcatatatgctatggcaaaaacagtttgtgacaatgatttcttttggcatgtttgccaaaatttttgatttaatgcctgtatcgacgcttgagatgtatcaccttcattagacaccaggacgtctaatgctgtaccgaactcttctggtctaagtaatcgcatatgttcagcaatcgttccaatattaacaagtggtttaccaacaataattgcctgaggatttaactgagcaccataatacaaggcaccaaatgaacccatagataaaccagataatattaattcatgtgatttaaaattcagcttttctaatgtctcgtcaataacattgataataccttgttcatattcagatgaaccgatataaaagctaccaccttcaacacgaggatcgccgataagtaaaaacggtgcattcatacgtttcatcatataatatccttcgaaaccttccgctgttcgataaccactaaaatatacgtttagtggtggtttcatatcaccagggtggaaataataaataaattcctgtcgttgactatctacgaaacgactaccaccaagtaaaaattgacccatgtctaatctagaccatcgtttgtgtataggtcctaaatgtaccgtcccgttgccacgcgccttaacagttacacttatataagcatcgaatggtttcgtaggtatctctaaaggactgtctaacatatcatcagttaatatgatttgttcaattaatgcaccatcagcgccagtctgaatcaatctaaatgtatattgcaactcgaccgcaccatcaatatcaaattctggccatatttgaataactttatctttatcgtaaacgagattattttgccaagatgcgataggtttaaattcttttccaaattctccactcaacgtgagctctgaattaccttggtaaacgacatctcctttaaaattcggatgaacaagtgctaacttaggagaaaccttatctccatactgtcctgagaagctaactgcctctaatttattattacgttcttcaatgttccggtaatgtaatggttgaacaacgtatttttggacattttcgtcttgttcatattcaacagaccaaaatgattcatcaacatacgtattgtatggttcgcttatcattcgtaataaattcgttaatgtctccgagtatggtgcttgaatatagataaaatcaaagcgcccttctgcttcaacaatcgcttcaatagcctctacataaccactatcaaattcaaacaatccaatatcgaagtaatcccaactcacaccttttttgtgttgaaaaataggttctaaatcgtctcctccaatttgcaaaactctaaatttacgtggcatcattttcaccttctattaactcatcgagctgattaataatattcttagaagcatatgcatctattaattttaaagaataggcgtacgcataattccaatttttcaaataaaacaaataataatttaacgcatcatctaattcatcaactgtatttataatacggccattgtcataatcagagacgtaatctgtttgttgaccattaatttgtggaatcccagcgctaattgcactaatttgtaaatacaaatcaggttcttttgacatatctatcacaagtcgcaacgtccgcaatgcttctacaacatcatgttcagcatgtatcgtcttaacagcaatgatgtcatcttgatcttcaggtgtcattaatgctgaaacattaacatccgcattctgtttagcttggtattcctcatttaccgacgtaatacattcacgaagccacaacggtatgtcattttgatggcgcgttaataaaattaaacggtaattatcttcttgtacgatataatccacaagtcgttgcatcatttgttgcaaatcagcgtcactcataccatctatccatacacctataaatgtttccatcaattgactacttatattaggtgattgtctcgtttcaaatggcgtgattcgaatcattgtattctctcgctgatgcttctcttgatgactaattaaatcacgttctagttgcacactatcaacaattaaatgggcattctttacgatagattgatattcctcatctgacacagtttcatttctatttttaaaaaatgaataacttaatgatttcgccggaatatgattggctatttgtcgattgtgcctagcatctgaagccacaatcatatgatcatcttcatgtatttgttgtgcaatcattgcttgaaatttttcttcaattagttgagccatattgttatattctgtttgttgatagtgatgttgatatctttttgaaacattgactcgtccattttttaagttttcataaagcacacaatctccattaatcgttaaatattcttggtaagaagcctctccctgattatcaaaataacgtatagctgataaataacctctgtcatcaaaaatataacgccgttgtaactgatctctttcaaattcttcaaaccaaattgaatatccttcttgactaaaataaatatttgtataggtctgttcactcgtcacacattttaataaatacggcgtgtacacaaactcaacatcatccggccattttaagtgatgataattaatcgcttgtggcgcatggtgactgaatccttgaatttcatcaaacacagaccaatactttgtttcatacaaatcatatcgatgtaaaaatgttcttatattcggcgcatgattgagaacaatcagttgataatctaagtcattttcaaggtgcattcccattaaactaatcatatcgtcaaattccgtcttattttgtagttgataatacggcacagtcgtgtcttgccaccatcgttggtcatcgtaccaagctggaataaagtatttcataattacctccttaccaatactggtttaaaaatggcttatatttatcaaaatataaatatgtacgaattgtttctgcaatattaatactgatgtaaactaatacaatcagttgtactgagaaataaatttcagtagataaatgcggtacaaacaatgtgaaataaagcggtataccaataatgactgtaactaatgccgatccaaaccaacatacgcgtcttgcttgataatttaaataacgttctgtatccttaccaggtttaactcctgaaaaataattgccacttttcaagaagtcttttgatttttgttttgtatttattaaaaatctcgataaaaaataacccaataacatttgaatcactaaatatactgaaatacctactggactatcaaacgtcagcattggcatgtcatctgatatgcttttattaaaaattgataaaataaaatgaatgccactttttaagaaaacaaaagctgaaatgctcatcattaatgtaatactgcctgcaggattaaccttccaagacaaataagatttcatatttgtagccgagacattcatcaaatcaatatacggaattctaacttctactaattcaatgaataataggataaacaatgtgattatcacaaggatgattaacaacgcaatcacaatatgacttgcatctatatattccattttttgatgcatcattgatttaataatgctaaccattacaatcggcattggtcctgcgatgccgtaacgactatttttgtcagctaaccaaactaataacatcgttccagtaaccaaaatcaatattgttaagtaaatattgtcttgatgaacacgttgtttcgaaacatattcatgaatcacaaaataactttgaataacacttaaaattaatgttaagatgcgctctttataatgcttctcaagacttgtttgtttcatgtatttatccatattccgataagaaatcagcatcaagataatcattgatgttagccacggacctaatcccaaagtaaaaatgtttaaagtattaacgtctccacccatattagaaatagctattttaaaaaacgactcatgttttacttgcatatcgttatacgaaacgatagaaatatttgtacctaatatataaataaacaagataaaacatgtgtaaagtatacgtttatatataattttatattcgtattgttgtaaaagttttaacatgttacacctcttttatatcaaaaacattaaaaagactaaggatatttcactaattattaaaatctgatatagattttttagtgaacaacgccccagtctttttaattttagccagctataaattcaatttatgcttgagaatcatcttgatcattttcatctttctttttctttctcttcattaaacctaaaccaactaataatgtcataacgccacctagtaatccattttgttttattgagtcacctgtatctggcaatctttcttcacgttgcgcaggttcagcatcatgttttgatgatacagatgtcgcacttaatgttgactgagattcatttgtatttggtgctatggactcacttgttgaaatagatgtgctcgtgaaatgagtctgactcgtactcatcgaatttgacggatgtattgagttagattctgatgtactcattgacattgagttagacatacttgatgatgttgagtcgctcattgaaatcgagttagacatgcttgttgatgttgagtcgcttattgaaactgacgcactttccgaattagacgtacttaatgacgttgatgcgcttgttgacactgattctgagtcactcattgatgttgagtcagatacactcgttgaaccagatgtacttaaggaactagacgtactcgatgagtcagatacgctcgttgaacctgaacctgacgtacttaatgattcggatacgctcgttgaaccagatgtacttaaggaactagacgtactcgatgagtcagatacgcttgttgaacctgaattagacgtactcaatgattctgagtcactgatagaagttgaatcacttgtagattctgattctacagcactttgtgaaccactgatacttattgaagtcgaatcacttatactgtctgatgttgataatgacgtcgacaccgacgtgctttgtgatgtcgatgtacttgcacttgctgacattgatgatgatatcgatgtgcttaacgaacctgatgcgcttgtgcttgttgactggctttgtgccatagaatcacttagcgactctgatgtactcgttgagctcgagtcacttacacttattgaacctgatattgagtcacttaaacttgtcgatgttgaaactgatacgcttccgctcattgaatcagatgttgaaagtgatgtactcgttgaatttgatccactaatgctagacgaatcgcttgtagacattgagtcactttctgatgcactgatgctcatagagtcaaattgactattacttgttgagcttgactgcgaatcgcttacacttgttgacgttgattctgatccactcatactttgcgagctactcaatgattttgaatcacttaatgaatcagaagtgctaagacttatggaaccacttaaagatattgatccacttaatgagtcggagtcacttgtactagtagaatcactcattgatattgaatcacttagcgagctagactcgcttacactttctgaaccacttaatgatgtcgaagtgctcaatgaacctgatgtacttgttgaagtcgaaccacttgttgattttgaatcacttaatgaatcagattcactcacgctttctgaactcctttgtggcgtcgatacacttaatgatgacgaatcgcttgtgcttactgaatcactcatcgattgtgagccactcaatgaactagactcgcttacactttctgattttcttaatgacgttgagacgctcaatgagccagaatcacttacgcttgttgaaccactcatcgattttgagtcactttcagaattagattcacttacactttctgaatcatttacagattctgacatactttgtgaatcagatatgcttgcgctcattacttcactagccgatgttgatgtacttgtcgaatcacttaacgatatagacgcactcatcgaaccagatgtactcgtacttgttgagtctgatgttgaatcactcacactatcagataatgacgttgaatcactcacacttgttgatgtacttgttgaaagcgacatactttgtgaatcaagcgtacttgtacgcatcgaagtactagttgaagctgatgtactacgagagtcacttgttgatgttgatgtacttgccgatccagatgcacttgtacttcttgatgtgctttgtgaatcgcttaatgatgttgatgttgaatcggattcacttgtactttctgatgttgagccagattctgatgtactttccgatactgactcacttgcaatagtagacattcggtttgatgttgatgtgctttgtgaattacttaatgatgttgatgtgctttgtgaatcggattcactgctttgcattgacgctgactttgaatcacttaacgatgttgacgacgaatcggattcactaatgctcgctgagttactgagcgatgttgacgtacttgctgatcctgagttgcttgtacttgttgagtcactgagcgatgtggatgtactttctgattttgactcacttgtgcttgttgatatgctttgtgaatcggattcgctttctgaaccacttaatgatgctgatgtgcttgtcgaacctgattggctcgtacttctagaaatacttgttgaatcgcttagtgacgtagatgtcgatgttgattcactttggcttgttgactgacttgtatatgatgatgtactttgtgaatcggattcgctcgtgcttgtacttgttgaggttgaggcactttggcttgctgagtttgagtctacaccactttgattcattgaggcactcagtgacaatgatgtactcgttgagtcagacaaactttctgatgttgacacacttgtacttcctgatgttgattgggacacgctcaggctcattgatgttgattcggatgtactttcacttgatgatgttgagccggattcactctcactcgttgaaccgcttaatgatgtcgatgcacttaatgactctgattttcttgtactgattgaatcacttgtcgacattgatgtacttaatgaatcagacttactatcacttgtggaatcacttaatgatgttgacaaacttgtagagtcagacaaacttgtactcgttgacgtactcagtgatgttgaaacactctcgctcttaaacgttgacgttgattcactgttacttgtcgatgttgaaatggacgcactaccacttgttgaattacttaatgatgttgaagtgctaccagattctgatgtactgtctgataatgacgtactcgcacttgtcgaactactcactgactctgatgttgattcagacgtacttacacttaatgatatagacgtgctctctgaagcagatattgcttcacttatagagtcgctcgttgacgttgattcacttattgagtcagactctgatgtacttaaacttgtggaatcactcatagatgttgatgtgcgttctgaattacttgtacttaacgatgtcgaagtacttaccgaaccagatgtacttgttgatacactttgtgatattgattcacttgatgcagttgaagctgatttgctatcactcgttgaatcactaaacgacgttgatatgcttgttgaatcggattgacttgtgctcattgaaccagatgtactttgtgattccgacatacgtactgaactacttgttgatgttgatgtgcttgttgagccagactgacttgtactcaatgataatgacttactgtcagaatccgatgtacttatcgaatcacttaatgattctgatgtactacctgactgagacgtgctcattgaactacttacagacattgatttactgtctgatgcagctaatgatccacttgtactcatagaatcgcttatcatttcagacgtgctcattgagtctgatgtgcttgttgagacactttgtgaccccgctacacttaatgatccagatactgaatcacttgtgctcgttgaatcgcttaatgactctgatgtactcatcgatttagaatcgcttgtacttaatgatattgatgtactttgtgaatctgatttgcttgttgatgcactcactgaattcgaaatgctattagaaatacttatagattctgatgtactacctgactcacttaatgattctgatgtactaattgaatttgatgtactatcacttaccgattgtgatgtactagccgaatctgatgtgcttgttgataagctttgtgacttagacaagcttcctgatgtactcatgcttactgaatcacttaacgatgttgatgtacgcaatgaatcagatgtacttgttgatagagtttcggatttttcagtactgctagagttcgaaatagaatcgcttaatgatgttgatttactaactgaacctgacatgcttgatgatacactttgtgaatttactaaacttgtgcttgttgagcttgattcactattactttcagatgtacttaatgacttagatgcactcactgaatcagataaacttgtacttgttgatttcgaagtactaactgatgttgaagtcattattgaaccagatgtgctcgtagaagcactttgtgagtcagctttacttgttgacacactttgtgattgttgggtacttcccgatgttgatacggaatcactcatactatttcttgttacttcatatttaaaagtggttgtcgttttgttaccactcgcatctgtagaaacgattgtaatagtacttgtaccaatgtttgttggtgtaccactaatagtattatttgtgctatcgaatgttaatccagacggcaatcctgtgactgtatttgttactgcattaccactattgtcctgcgtagcaattttaatcggtgatattggagaaaaaacttctgatgatttatctcctattggcgtcactgctggtgctgtcgtatccacaacatttattataaaagttgtcgtcgatttgttatttgcttggtcagtagatactactgtcactgttgattgaccaatttttgttggtgtcccaatgattgaattcgttgcactatcataacttaatccgcttggtaatcctgtaactgtatttgtcacagtccctgtaccattatccgttgtagtcaacacaataggattcattgttttacccacttcaatggtttgattgcctacagttacagttggtgcttttacatcagtaaaataatatgtcactgattgtccagcattcgtcatttttacagttttatttgtatcattataagttgatgcatatgaactatcgacagatgtgtagttatatcctttagcagtcaatgcagattgttgattatcgattgtcacgacttgatcaacatttcctgaatatgtttttgggggaataatatctttacctgttgttacatcaacgtatctcacttgtgtaacagcagattctgtatattcgaatgttccaaattgtacttgttgtaaatttgtcgcaccacctgttgaggctgtcattgataatgaaaagttggtcgtaccacttttcgcaatccaatctgaaatattacgtgtccatgtttgacctgcatatttaacggtcataacttttgtatcaccattataattaatatcaaaatcttggaacgtgttgtttgtaggttgaacatttaacttcgcagcattatcagctgttgaacttgatgtatacgttgtcgcaacaccataactatctgttgttacaaaggcaccaaacgcacctccaccagctacattagatgggtcagcattcgcctttgcagctgaatttggtttagatgtattgtgatacgtatccaatttgaaaccaaatgcgttacttaagccaccaatacctactgcggcaccgtttaaccctgtttcacctaatacacctggcgaaaaggcaaagccgataccatctccaccatttccattaccttcatatttgttacctaaatttacttttccagaaaaatgaaaactcttattagagtcaatacgtgttcctaatgtaatggcacctttttgactgtaagtatcttgcgttaacgtcacaataccggtactttggtcataagtggcattacctgaagttgtcatatattgttttaagttatctttattaactgtaattgtattagcagttaatgcggttgtcgtcgctgctgacgcaaatgttgacatagctaagcgactgaaagttcgaagttttactggtgcggtgctagttgacgttgtgctagttttgtttaagttggctgaagatggcgttgtgctttgtgaagtgttatttgatgcagtactttgatttgttgatgtattaattggttgttctgtacttgaagttgaagctacagatttagtatcagaacttgatgtagtattctttgaggatgttgattctgatgtagatgtcaatttttcttgttgattgcttgtactattagttgtcgaagtgacattctcagacttttcacttgagactgtgtcactatttgatgtttgtaccgaactactatttttcgttacgcttgtggaatcggctgttgatgttgatgcatcgattgtcgttgagttttgattacctactgtttcactttgtgtatttaattcagatgttaatggtgcatcagaagccgcaaaagcttgctggtcatgcaacatgtttaccgtgaatgcaccaccaataactgccgtcgttttcagtccgtatccagtcatttttttactaatgctttgattatcttgactcactatactatgactaataaatggtagtcccattattttgaacatttctatttctttaattccggatttcacccaattttttccagatttataaagtcttactcttgttttttcgtttgctaagctgtcatgaaattctttctgtcttttactcatgtaataactccttgtattatctttacattcattagattataatatatgccactattcaatttaatacaactctttttccaaataaaaaatacttaatttgtcaaaatccaatttttctcaaaagtatattctttgatgaaatcgctttctttattgtgtgggatttagtataattttttaactatattctgaataacatgccttattatgtttatataattttgaaatcagtgcttatcatcttggacatcttttatttatttggtaaaaacttctttttattaaaatgtatttatcatccaccttttattcattaatagtcaatttacaactaaaagataaatattatatttataatacatctttaatattaaagtaatatcaatatattttcaataaacctagtgttatatatctgaatttctaaaaaattcttctttaaaattataaatatagcgacatatcgcttcccggttttgaaatataaaaatacatcgaaactaatttcaacgtgtagttccgatgtattgaaaatgattgaattcattatttcttgttatctgattgattatcaaaatttcttccttctaaacctgcaagctcttctttagaagctgatggtgctttcatttcaaatatttcattcacaaccgtgtaatcataatatcctaacctagcaataggtttaatcgacttaatatctaatttaccattatcaagaatgaccttatcgtcaatatgaacctgagcaactcttcctataacaatatcaactgttgatacagggtctcctgtcggaatacgaatcgtttgaacgtactcacattcaaaatgtactggcgattctttgactcgataacctggtgcttctatacatgcttctttcgtcacacctgcatattcaaattcatcctcttcaggtggtagtgccttcgacgataaattaacagcttctcttaaatcatacgtggccatgttccatacaaaccaccctgtctcttctgcattttttactgtatctttacgctcatgatcaccaagaacagattgatttgctgcgaacataaccataggcggatcccaagttaagttttgatactgactataaggtgctaaattatctttcccatctttcgatatagtagagatccaccctattggacgtggtactgtactacttttaaatggatcgtgtggtaagccatgactccttacaccttgcttcggcgaataattcattctattctcaccccttattagtaattacatttaaggttacgctctcatgacataagcgtctaatataaataatcaatttatttataagtagaaactatatatgacgtggttgcttataatttgcgttcttgattcgaaaatttcagataaggatttatgcaattaatatttaatgatgttttttgttaatttaattaatattagttaatataatcaatattagcttataataatattgaataacattattttagtttttgtataatttgcctatcaactgaaaaacagctaatacaaaggagctaatgaagatatgagaaaaattatgcgaatcttattatgcacatcaatcatagtaagcggttgctctttcataccaaagaaccaaacaaaagatatgccaaagacggttagcgtcaaagattatgatggtcaatatattggtgaacataaaaaaagaaatgaagtatttctgaaaaaacataaagatgaagcgatcaaaaaatacaaagactacgtgaaagacacctttggttatgattgtaaaattaatttagttgaggcctatactaataaatctgggtttagtgagaaaagcaaaacagatggtttagtagtcgtcggtactgttaattatgacgttccttttcaactccaattgatttttgttgaatctgacaatggcgtagctatcacaacatttacacctggtcatataaatgaaacatcagcggccgtttcagccatgatgtacaaacgttatgaacatgaaattgaagaagctcgattaaaattcaaatcagaagttgagaaaaacggttattacaccatgaatgaaaaacttcaaaagaaacaagaattcaatggtgttactaaacaatttttgaatttcaacacagacagtatcgatgatttggataagttcaaaaaagaattcaaacctgttatgcacttaaaaggtgatgcattcaatcaacaattacaaaatttaattaataaatatcctgaaattaagaaaagcatgaaatctgactttattgcatattatgataagaaaagcacaaaaaatgttaataaatattcatgggatttacaaataccaaccaatgacacaatgaaaaaaatacctggatcgaaaatgatgtatttttataaagacagtgtttctccatctgaaattggagaagatggtaagttagaaaataaaactaataaaataactatgtctggtggaaattgggaagagattcaaaaagaaataaagtagcacaatgtcaaaaaacaaatattttatatttatatccccaaagcactaattatcatgaggagtcattaaaaatgagaaaactgataggcttcatattatgcacatcaatcatagtaagcggttgctcttgcataccaaagtaccatacaaaaaatattccaaagacggttagtgtcaaagattatgatggtaaatatattggtgaacataaaaaaagaaatgaagtatttctgaaaaaacataaagatgaagcaatcaaaaaatacaaaaactacgtgaaagacacctttggttatgattgtaaaattaatttagttgaggcctatactaataaatctggatttagcgagaaaagcaaaacagatggtttagtagtcgtcggcactgtcaattatgacgttccttttcagtttagattgatttttgttgaatctgacaatggcataactatcacaacatttacacctggccataaaaacgaaacgtcagctgcagttgcagccatgatgtataagcgttatgaacacgatatagaacaagctcggttaaaatttaaatcagaagttgagaaaaatggttattatgccatgaatgaaaaacttcaaaagaaacaagaattcaatggtgtgactaaacaatatttaaattttaataccgttagtatagatgacctagataaatttaaaaaggaattcaagcctgtcatgcacttaaaaggtgatgcattcaatcaacagttacaatctttgattaacaaatatccacaaatacaaaaaaatatgaagtccgagtttattggctattacgataaagatgcaaataaagaaactgtagctgattatgcttggagtctaaaaaaacccactaacgaaataatgaaaacatacccaggtgaaaaacgcatgagattttacaaagataaagtatcaccttatgaacttgatcaatatgggcgcttaaatcctgatgcagatgaaatatatgttatcgggggcaattataatgagaaaaaatgatcatataaccgatttagatgctattgaattaagtagtgggtggaattacaatgacaaaataaccttgtcagacgagattcatgttaatggaaataaatataaagttattaaagatcaaaaaccgactaatacaggtctcggttacaagttatatgaacgttatgataatgatagaagtacaggaaagttaatcatatcatttgatggtactgactttagtgacccgaacgatgtaggtacagatttaagactcgctggagactccattccaaatcaattggaagaagcacacaaagtgtattctgatttaaaacaaaaatacagtgatgcaagttctttaagtgatattgaattttataataaatataaagaagagtctattgattacaaaggaaaatcaatcacaaatgcagggggtaattcactctctggagccatagcccagtatttaggtgtattagatccaggtcttaacgtaactactacaaattctgcacctataccaaaatctcttacccgtatggctcgtcgagatgcaaataatatacataattaccacagtagaagtgataccttaactagaattaacatagtggacttatgtatcattccatggtcggaaagcacattttcctagaaaatggtgtgtctacgtttggagcattggtacctgctcatactggatacaactttgaagaaaaagagaagttagaccattttgatcaaaacaatattattaacaaggaagtctacacgagtcgcaatggattgaaaatttatgctgacatggatgaacacactccaatatttgtatggagtggtgatgctattggtgctggtacatcaaaaataaaattagacaaaggacatctggcggatctgaatgactatgtgcatggtagattaaccgaatatgtaaataatattgatattaaaatgaaagacattcgaacatccgttgaacgtgaaaataataattttagtcaacatgtaaatgaaacgaaagatcattttaaaaaagtaataaaacttaacgaattagaaggttggattcacaacatatccaatctgattaggactaaaattgaaagtaaagcggatgaattaaaaggtaacctcagaacacttagagaccaagataatattttagatttagtaggtgccgatcatattattaattcaattattgattttattgataaaattaccgataaaatttcaaaattcattaaatatggtgatgatttcatggaagctgcttttgatatagttagcaacactattgtcaaaatgtttgtcaacttatcagaaggatttgaggatggtgttagagaagaagttttagcccatttgaatgttgtcatactaaatattcaaattatcaaaaatcaagtcactaatttcggtgatggcattaatgatatattgacccaaatgacccatttggatgacaatgtaatggttaacaacgtacccatcaataaaaatgctacaaagcaaacatcaaaaccacttgcagaatctaagaatttattattaaatttagaaatccgaaataaagtgatggaatctggtttggctacacttgcgtcaaatataaatcttttattaataccagaaacactaagaatcattgcgctcatttctatagttgatgcatgcacgccaacattatctaattttgttggtaagattgaatggattgcctccaaagttccatttgccaagacaacagcggaaacacttaaatctttcaaaaatcttgttgataaattacatcaacaattaactgatatgcgattaatccttggtgaacttatttttacagaatttgttattgttgagatgcaagactttttcaaaaatgccctactatcagatagccttttaagagatattaaagtattaagttctaatgccaaaggtgacgccgacatgttagaaacggaacttcatgctgttataaacgcaatgtctcaaaacgaaggtaaatctgttgatgcacttaaaaatagtaccgcttctctaaaaaacaatctaaccaaattaaaagagcaactcgataaaaccacacattaaattcatatattttgagtgaatagaattatatttccatagcaaacattcctgaactacatatgttacataagagattcatttttgaagaaacgggtaaaatgataaaacaaccgtttttcaaaaaatcaaatattgggaggaataaaaatatgattttacgttacgtgaccaatttaaaacttgcgaaagagctataccaagccagtaaacctaaattgcaagaagataagggtatgattgaactgtttgaacatacttttggcttgcaaaaagaacttgtaaaatacgtaggcattgcagaagcaactactgctgctttatactcagctagctttatcaataaaaacatttctcgccttgcttccctatcaacaataggtattttaagtgtagctgcttacaaacatttcgaagctggtcatggaaaaaaaggtgcgcaacatgcattagatttattaggacttgctactttaagtttactagatacattttcttgtaataaaaaatagtcttcattttagaagcacatactttagcacctgtgtacttttgattcaattcataaacggtacaccgctatagcatgtgttttattatttttctggtctctttattgtaaatattccccctaatttagcataatcatttccggctaaacgagaaacagcctgtaatgcgtgtggattgattttaaaattaccctcataaatactgtcatcaatatgataagttacaatttcgcctattattaagtcagccccatctaatacatctccaagcaatatcatttgcgatagtttacattcgaatctcattttcgcgtctttaattcctggcgtcttaatcgttgtagatgttaaaagtgataattctgtacggctcaactcactgtcaccatatgctaacggcgctgcagtctcattaatatcttgaacattatcttcgtctgtaatatgcacaacaaagtctccagtccgttctatattcaatgcagtatcttttctcttacctcctgcacgttgaactgcaatagcaatcattggcggatgattattaacaatattaaaaaagctaaatggtgctgcatttactgatgcatcttgatttaatgttgtaacaaaagctataggtcgtggaataattgaaccaattaataatttatagttttctctagcagttaatgattgtgcatcaaacgtatacataatacctacctcttttcttagtatatctaggtatttctccgatttcagttaatttaaacatctattctcctctgaaaatcacttgtatttatttagcaaatcttttgaaatatgacacatgtgcatatcttctggatatttttctaaatgttgctgatgttcttcagcacttttaatgtagttagacagcggtaagacttccactgcaatttgatctctgtctttacgtcgttcaatgaactgacgtgcttcaattaagtggtcatctacacaactatataaacccgttcgatacttttctccaatatcatttccttgtcgattcacactgtatggatcaatgatttcaaataaataatccatgatgtctgtaattgttaacatacgatcatcgaaatgaagtttgacacattcagcataaccattttagagcttcttccatttgctcttcctgcttctgtatgtataattcctggtattgttgtgaaaaatgcttcaacaccccatagacaccctcctgctacataaacaactgccatatttacacctcatcatccttttttatatttttaacaaggttataccatttaataccgccatgacatgattctgatacaccttcattacgatacccatatttttcataaaaagaaattaatgattctcgacatgttaacgttacaccatgtcgatgttgattcttagcaagattttcaaaatagtttagtaagcgacctgcaataccctgaccttgataatttggtgctacaacaagacctaacacactaatataaccaccttcactattatttgtggggacatttttaaataaatcatcgctaatgtaacgctcttttatgacaggaccgttgatatatccaatcacttcatcattcttttcagctacaataaaagtttcttgaatttgttcaattctcaatttcaatgcctctggtgttgcagcttcttccggtgaaaaaccaatattttcaagtgcaataatttgatctaagtcctgcatgattacttttcttaataccataaaaacacttccttatccctatatatcaaaagtaataccttcatctatatattcattattttcaaactaccttcactataaaaaacgagtctttttattaaaagcatttcgccttaatcaattagacaagttgtattatacgaattagcaaataattatgattataattcattttaagcatacttaaaaagactggtacatgtataccagtctaattagaaaaaatatatttagttaaaaccatttcaaaaacgacttcacttttcctggcttagtcggtctgtctaaataaacaaaattatcattgattactgaactggcatttcgaagtaatgcttcaatgtcattcgaatatttcttcaatttatgattgtgaaataattcttgcatcaaaaatggtctttggtcacatgaatgtgcatctgaagctacaaaatgagccaaattacattctataaattgtaatgataacttttgaatgttttttccaaatccaccaactaaagaactcgatgttaattgactcaatgcaccatttgcaacaagttcatataatatttctggatttttggcgatacttctatttctttcaggatgtgcaatgattggtatgtagcctctcgattgtatttcaaaaaacaattgttttgtataatgtggtacttcacccgttggaaattcaattagtaaatatttcgaacgattaataccttgaatactaccattatctaatccttgcagaatcgaatctgtaattctaatttcttgcccgggaaataatttaatatccaatgcttgaacttctggatgcgttcttaactccgccaatttcacaagcacttgttgaaatgtattatcatatctcggatgcaaatgatgaggtgtcgctacaatacttgttacaccttcatccttagcttgctttaatagtgcaatactcttttcaattgttttaggaccatcatctatatcaactaatatatggttatgaatatcaatcatgattcatcagtcccataatatgcatagtaactagcacttttatctttaggcattctatttaagactacacctaataatttagcacctgttgcttcgataagttcttttccttttttaacttcatctttattattattttccgaattaactacgtagacaacattgccggtaaactttgaaaataattgcgcatctgtaactgtgttcactggtggcgtatcgataattacaaagttataattcatcaataatgtgtcatacaaatttgcaaatgcccttgatgtaattaactctgacggattcggtgggattggcccagacgtcaagacgtctaaatcttgaatttcagttgagataatactgtcttgataagttgaccaatttagcaataaacttgaaagtccttcattgtttggcaaattaaaaatatagtgctgcgtaggtttacgcatatccccgtctacgattaatgttttataacctgcttgtgcatatgcaactgctaaatttgctgcaattgtagacttacctgcgcctggtgcctctgaagtgattacaatgctttgaactgcactgtcaggatttgcaaacataatatttgatcttatgcctcgaaatttctcgctaataggtgactttggttgttcatggacaattaaacttgatgtacttcttcgtgtattcgtcatggtaattcctcgtaaattaaaatttttgtattgaacctaaaataggtaatcctagttgcgattcaacatcttcttccgtcttaatacgcttatctaatagttcttttaagaaaataatcaatattgctaaaacaataccaacaatgatactgatcactaagttgacagatactattggagatacttttacagcattatcatgtgctgaggaaagtatcgtaacattatcaacactcataattttaggcatgtcatgtgcaaaaactttagatattctattaacaattttgtcagattcagatttattcccagttgtaactgatacagtaataatctgagagtttgtttgattggttacttttaaaaacgaattcaactcagctgttgaatactgaccatcaaactctctagatactttatctagaattcttggacttttgataatttccgtatatgtattaacagactgcaaactactttgaacattttggaaagctaaatcacttgaggactttttcatgttcactaatatttgagtagaagcagtatatttgtcaggcataacaaaaaaggttaatgccgcacttactacaagacatattgccggtaaaataagcaataatttaatattcttctttagaatatttaatagttttactaaatcaaacttttctttcatggtttcctccacataatcaatcattgtattcattatgtacgttttataaatcgtacaattatatctagtttaacgaccacaaaacatgcacaactacattttctctaattttttatataaatattttatcgtttaaaattatatcatgattcttgaccattatgtataacttatttatatttttgtaaaagatataatattgcccaacttcaaatatccaaacctattaataataaacctagataccatcgtactctatcatagctttcttataatcgagtagaatcatcatcattacttgattatttactctttacaacaccgagcgtgcccgtattcggtagttcaataccttgcgtaattcgtcactgtgagttgagttaatgataataaagcccacatctttttaaaagatatgggtaatttatataatttttatttacattttaaacttatataaaaaagcgcctatgtcatgatttaccatcacataggcgcttatcaataaattattaattattactttccatttcatctaatttatgcggatttcctgtaattagatgacaacttattcttttcaggggaacattacatttttataatatgttcaaagacaaacttaaccattcacaaatataaagaataatattatcaaatcattgaacaaatcgtattttgcaacaattgatatttatattaatgtattgcatttaatttataaaattcatatacatcttaatattctcaatttcgagttgtattgtcaactttatatagatttaaaaaaataatctcatgtctttttttacaaaagtaagttaattattacaaactagtaacaaaaattatttcttcaaaaatatatttagtagcgaatacacttcatctttgaattgacttttactttcttccactgctccaaatttttgcgaaaaggatgctttcaaataccaactttcaagaaacagcaatattaaattctgaaagtcttcttttgtcatctttatctttgattcatcatagaattttgctatctctttacttaacgattgatttaaatcttgtatttgtccgtaaatatttccagaaaattcctcaggcgtattagataattgaacgtacattctaatatacctttcttcgatgtcgaaaataaactcaaataagaattgatataaagcatcaattgaatagttcgatttattttgattcatcataataatattattaaggtaatcaaaacagcatttaacactttgttcgtaaatactttttttcgagtcaaaatggtaatataaactcgctttttttatatttacacttttagctatatcatcaagtgttgtaccgtcataccccttctctgaaaataaggttattgcgttgtcaataatcttatccttcaatttttaaaaccccctactgaaaattaatcacactatgttacaggaaaattaagttgcaattacaaatatttccgtttaattataacaacaatctattgcaaattaaaatactatcaattaccatatggcttacaacctaactaacgaaaggtaggtaaagaaattgcaattttttaactttttgcttttttatcctgtatttatgtctatttactggattgtcggttcaatttatttctattttaccagagaaattagatattcattgaacaagaaacctgacataaatgtggatgaattagaaggcattacatttttacttgcctgttataacgaaagtgaaacgattgaagatacgttgtctaatgttctgacacttaaatacgagaaaaaagaaattattatcattaatgatggaagttcagataatacagcagaactcatctataaaattaaagaaaataatgactttattttcgtcgatttacaagaaaacagaggtaaagccaacgcactcaatcaaggtattaaacaggcttcatatgattatgtaatgtgcttggatgcagatactatcgttgatcaaaatgcaccatattatatgattgaaaatttcaaacatgatccaaaacttggtgcagttacaggtaatcctagaattcgaaataagagttctattttaggtaaaattcaaacgatagaatatgcaagtttaattggctgtattaagcgaagtcagacacttgctggcgcagtcaatactatttcgggtgtcttcactctatttaaaaaaagtgcagttgtcgatgttggctactgggatactgatatgattaccgaagatattgcagtttcttggaaattgcatttacgtggatatcgtattaagtatgaaccgcttgccatgtgttggatgttggttccagaaacattgggaggtctttggaagcaacgcgtgagatgggctcaagggggacacgaagtattactacgagacttttttagcacaatgaaaacaaaaaggtttcctttatatattttgatgtttgagcaaatcatctcaattttatgggtatatatagtgcttctatatttaggctatttgttcataacagcaaacttcttagactatacatttatgacatatagtttttcaatatttctactatcatcatttactatgacttttataaacgttattcaatttacagtcgcactctttattgatagtcgctacgagaaaaagaatatggctggactcatatttgtaagttggtatccgacagtatactggattattaacgcagcagtagttcttgtcgcatttccaaaagcattaaaacgtaagaaaggtggttacgcaacatggtcaagcccagacagagggaatacccaacgctaaaatcatcgctaaatattgtaagagaaacagcacttatcgctatatcgtgtgtcttttggatatattgtttagttgttctactcgtttatattggtactatatttgaaattcatgacgaaagtatcaatacaatacgtgttgctttaaacattgaaaatactgaaattttagatatatttgaaactatgggcattttcgcgattatcatttttgtattttttacaattagcatattgattcaaaaatggcagagaggaagagaatcgtgaagtatagaaaattaataattttagtgctgagtatcttgatcatattgcctgtaagcacactggatggtcatcatattgcaaatgcagatgacgatccacctaaaaaactgaaatataaagaaaatagtgctctggcattaaattatcaccgtgtaagaaaagcgaattttctgaataattttatttacttcttttctagtagtaaagaaattaaaaattatagtgttagtcaatcacaatttgaatctcaaataaaatggctaaaatcacatgatgctaaatttttaaccttgaaagaatttttatattacaagaaaaaaggtaagtttccaaaacgaagtgtatggattaactttgatgatatggatgaaactatttatgaaaatgcttatccaatcttaaaaaaatataaaataccggcaactgggtttattatcacaggtcatgttggggaagaaaactttcacaacctcgatatgattagtaaaaaagaactaaaagaaatgtataaaactggtttatgggaatttgaaacacatacccacgatttgcataacttatctaaaaataataagtcaaaattaatgaaagcttctgaagctacaatcataaaagatttaaacaaaagtgaaaaatatctaactaaaaactttaaaaagtcgcagaaaactatagcctatccttatggcttgatgaatgacgataaattaccggtaatcaaaaaagctgggttaaaatacggtttttcattagaggaaaaagcagtcactccgaactccaatgattattacatccctagaatattaattagtgatgatgcttttgagcatttaattaagagatgggacggattccatgaaaaagattagacttgaactcgtatatttacgtgctattatatgtgcaattattattatcacacatttacttacacaaattactttaaaacatgaaaatttggagggaggatccttagtattacaattttacattcgtaatattgtgatttttggtacaccttgctttattatcttgtcacagttattgacaaccttgaattaccaaaaagtcacctatagatacttaactacacgcgtaaaatatatacttattccttacatattaatgggattgttttacagttatagtgaatcattattaacagattcaagtttcaataaacaattcattgaaaatgtcctattaggtcaatggtatggctattttatcgttgttatcatgcaattctttattttgagttatatcatttttaaaattaactataacctattcaatagtaaaatattattattgttatcttttattttacagcaatcatttttatattactttacgaataacacagcgtttcacgataccgtgctacactattatccattaagtgaaaacactataatattcggatggattttttatttctttttaggtgcatatatgggttataactacgaacgtgtattaaatttcttagaacgttatttagttattatgattgtattagctgtagctacttattttgtgtttattgcgttagcaaatggagactattggaacgttaccagcttttcatattcattaacaccatataatagtattatgtttattgttatcttgggtatttgcacgcattttaaaacaatgttatttaatacgattcaaatgattagtgctttctcattctttatttatttattacatccaatcattttagactcattgtttgcatatacaaatatatttgaggataatacaatggtctttctagcgatatcactactattcattttaggattatgtataggtgtcggtatgatattgcgtgaattctatatctttaggtttattattggaaaacaaccatataaattgaacattaatgcttattaattattaagctatgttaaaaacacgcggtgggcgaaatcagtttgaattgactgacttcgtttgaccgcgtgtttaatattgttatacatatattctaaatgcacatttaaactacgtaaatgccaatgggagtgggacagaaatgatattttcgcaaaatttatttcgtcgtcccaccccaacttgcattgcctgtagaatttcttttcgaaattctctttgttggggccccgccaagatattacttgaataattcttttagaattctaaataatgatccgattaattgaaagaagtctgctgtcattgtatatacctccctttactttataaattatgcttgcttagtatcagtcaccttttcagttttcactaaatcgtctgctaaatgatgccaaaaatcttgtaattcttctcttgtgcgcactgtatcagaactatcttgtccgacaaaatcaacatgatcccaatcatgttttgtaggcgttacttgccaaatgcctttttgaattttatccgtcgcatttgtataagcttgattaaatggatgttgagaagaaataacggatactaaaccatcgttttctcgccattctttttcagtagctttaccgattaagttaccagtaatcacaaatgggaaaaacatatttaagtctgctttttgtctatcgctatttaatgctttgtgcgttgcttcaccagtgtatgttttatacacaatgttagggttcaacgacgttttacgatttaaatctgttgcaccctcacgcgtcagatcgtaaaatccattatcttttgatttccataaattagattgtttaacgcgtttgacataatcaatatatgattcatttggcttctgttttagaccccattgagccaacccgaagtctactcttgaatttttattaccaaacattttaccgatatcaaatacgatttgtctcactaaagcttcattaccagctaaatctgatgcgtgtgtaccattatgtggtgttcctaaagtagtaattgatgaaatcatattgtcattattacctttgaatagtggagaaatttcaccaccatgtttcttttgatactctatttcttcacgattaccattacgcagtaattcttctagttgacgtatcgtttgaccgcccatactatgtccaactaggtgtaccttctgtcctggtttccagtctttgtaaattccttcgtatgtttttccataacgttcatgtccatattttgctgcatgtgctgcaccataatctacacgaccgcctttgatataataataaagttcaactgcgcggtcatagttacttccaaaagcacttatacttgcttcataagctttgtaaccattttcttctaaatcttggcgaatgttcattttattaccgccccaataatgagctaacactgaaggattaatatcatctgtaaacccattgaaaccatgcactaaaacgataggatcttgatttttatactgcccttgtttggcaactttattcgtttgatcacctttcgcttttgcagtaagtttctttgtccctttatttggtaacgttgctactgcactactttttaataaatttaatccatttttcttgtcattgtcctttgttggttctactggtgatttttgattgttttttaaatctgaaactgatagtgttttttcgtctttttgaggtttcacttcttgttcattgttaaaattgtggttagtaattttagcattcgcttgattattttgttgcggttgtactttttctatttctgtcttattaacaatttctcgttggcttgtttgatttgacttatttaatggtagtgcttcctttgttcgactttgtgaaggtagattgttattagcgtttgaatcttgactattatctgcctcttttgactgttgctgtgacgccactttactttgtttgccatcattaatagcctgttctaacccttgatttacatcgctaggattagcattgttattttttgttgtatcacgttgaatatttttattattaagcgatgattttttatcatcctttagttgatctttattcaaatcatctgttttacgatgattttcttctgatattgttttatcattatgcaagttcttagttaaattttcagtatgttgctgttcgtcaacaccgttttcacgttgataattagcattttccctagtttgttgatccccaatagattgtgctgtaactgtatcctcctgtgaatttcccatattcacttgcttctcagctgcttgtgcttgtccaccacttaaaaatagtaatgtagctattaaaatggaagatgcacctacactaaatttacgaatactatacttattttgacttttcatcattgtcagcacctctatttttttattttagataaacaaattgataattattcgaggaataaactcaaataatttacttaaccaagcactcataatgaccatcctttctattgtttaatttgacgagaaagcgtttacatttgtatttaaaaaatatattctccaaagagaatttaaagtgtatacgctaatcatttcaaattattaattaatattatatttggcaaaatttaattagtcaataattagacacaatttaattatgcaaattgtaacttttttacatatatcttttgtgatttttaatatttacatgcttgggtcttgattccaatgatgtattatttttttagattagctgtatggggggatttatgagctatcacagttataatgtttgctggtgtcgtattttaaacctaaaaatatcatcccatccacaatgattgtatcaggataaaccattatgctcgtaactttgattgatatataccattgcatgttctcttctcaaagtatatgtcgtgttatttttaatttattgtttaattactcttgaactagctttaacttaatctcgaatttatgatgattagcataaaaatacaccccataaagttagttttttagtccaactttcgggatgcacatcttagttctaatggagattgtcttttaaataggctatgacatttctatttcaggctagatatatttttattcacagtataaatacaaagtatataaagacaactatgatattaataggtagtaacgacaaacataactttttagctttttcctgtaatgaatattttttacttaattctctctcaataaaaaatgtacttccaattattacaataaatagaagcatatataataaaaagttcttagtgaataagtctgtcattggtaacgaaaaaataattaatgcagttgcttgactcgtagtaaaaaaatattcattgaataattttttcatatttttcacctacatattattacaagcaatagatccgccagcataaagtgctgccattccagtaccgacaccccagccaataggaccactaccatcgctcccgttgtagcagttgtatgtgcaaaaccagttacagttagagcatcacaagtatctctattgcttatagtattttttctgttgtttttctacttctttattaaaggctactaaattctctttagctttttcgccaattttttcccttcataacttcattatatcgattcatatacttttcgacatctttaacagtgacatctattcctgagttgctcaatttacttttcataattatctttggtttcgtatcgtgattatccactagttatctatgacgagttcgcaactttagtaccatcacagcattcatagttaaaatatgttggttcgtattttaaaattgaaaatgtcacgttttccacaatatttgtaagtgtataagccatgatccttttctctatatctcagtccatacttgctttaccactgttcgatattttgtcgttcgcctttaaagttattgcgcttatgatgtctacgcgctaattctgcctcaatttctgaaaaatcgacgcctagcgcatgcatcaagacaaataaatgataaagttcatctgctacttcacttacaaatgcttttttgtcacctttaattgcttcaattacgacttcaaaagcttcttcaccatatttttttgtaatcttttctataccttctgttaataaatattttgtatatgacttttcattattggattgggcactatcttgaactgtctgcgctaatgtttgcactgaaaatggaacttctgtgttaaaacaactttgactgcctgtatgacatgttggtccatttggtatgacatcaattaaaatagtgtcattgtcgcaatctacatgaatatctttaacacgttgcgtatgaccagatgtttcaccttttgtccatagccgttgtttcgaccgcgaatagaaacataccacaccatcttctatcgttttatcaaaagcttcttgattcatataacccaacatcaatacttgttttgtttgattattttgtaaaattgctggcactaaacctttgctaaaatcaattttgtaattggtcatcttactgctatacccccttgtcgtatcacttctttaatagattgaaccgtcgtttctcggtcatgtaatatacttgcagctaaacctgcagaaacatccgtctgatcaaatagttctacaaagtgttgtgcattgccaccaccaccagaagcaatgattggaatatttacaagggattttatttttgcaagatgctcaatatcaaatccttgtttcataccatcatgccccatacttgtaacgaggagctcacctgcacctaactgttctacttgctgtacccagtcatatactttaatatttgtcatttttttaccaccatgcgtacaacaataatgtgcttttctttcaggatcataatagctatcaattgctatgcagatgcattgtctaccgaatttatcactcgcttgtttaattagctgtggattttttaaagcacttgaatttaatgatactttatctgcaccatgatttaacaattgggtaatatcatcaaggctttgaatcccaccccctacagtaagagggataaacaagcgtgacgctgtctgttcaatcacttctagcattaagctatgaccctcttccgtcttagagatgtctaaaaatactaactcatcagcacccgcttcattgtaatacattgctaaatcaacaggattcccaatatcccttaatcctttaaattgaattcctttaacgacacgaccatctttgacatctaaacatggaatgatacgttttttaatcattttagcccctcccaaaaagatgcttgatgtgcagcctttcctataatagcagcgtgaacatttaacgacgctaatcgttgaatatcttgctgatgtctaataccaccggaagcaatgacaggaatcgtcgtttcctttactaattgaccagttaattcaaagttaggtccggacattttgccatctttagcaatatcagtatatataatgccgccaagaggtatatccgataaccgtctcacaaaactaaataaatttaactctgtgtcctcttcccatccgttcactttaatatcttctccataagcatcaacagataaataaatacgacctggaaatgtatgtgccatctctttaagccaatcagtatcttgaatgcctttcgttccaactatgcaataattaatccctgcggcaaagtagtccatgatttgtgacttcgtacgaataccaccacctacttcaatatctttggttgttaatctcctcaatgacttaatataatcaaactctcgggcatgctgtgccttagcacctatcaagtcgacgatatgaatacgattcacactttcaaattgactatagtaagcaatactttcttcagccgaacgcgacattttttcttcactatcatatttaccctctgttaacctcacacttgttgacccaatcaaatcaatcgctggccataattcaatcatttataaatcccccttgtattgcctgacgcaaaatttgtaacccatatgtaccgcttttttcaggatggaattgaataccaatataattgttaaattggacaattgctggaatatcagccccatactgcgcatatgcaatgacattttctgacatcggcgcttgataagaatgtacgaagtaaacatcttgatttaacatagggtgcttactcactaaattattccagcctaagtgtggcactgggtattctgtttggatacgcgaaatatttcctgggataaaccctaatccagatgcatcgccttcatcactatgctcatacattaattgcatgcctaaacaaataccaatcatcttcttatcagtattcttagccaatattgcattgagatttagtcgttttatctctgacatcgcatctttaaaatggccgacaccgggcaatatgattgtttctgcttgattgattatttttgggttatttgagacaaccacctcataccccaaatgttcaatagcgcgttttacattactaatattccctaatccataatcaacgatgacaatcattcaatcacacctttcgatgatggcacacgctgatcatcagttgcagttagcgctatgcctaatgcacgggaaaatgctttgaatatagcttcaatttcatggtgtgtattaccaccacgaatcaaatcaatatgcgttgttaatcttgcattgattacgactgctctaaaaaattcttcaactaactccgtatcaaacgtaccaactttttctttacttaacgttgcattgaaagataagtatggacgcccacttatatccacaacgacacgtgctaatgtttcatccattggaatgtacatcgttccataacgaacgaaatgctttttatctttaatcatttcaagtaacaattggccaatgacaatgccgatatcttcagttacgtggtgatcatctacgtcaatatcaccttgtgcctcaatgtttaacgacagtccactatgaaacgtaaacaaggttaacatatgatttaaaaagcccacacctgtattaatatgcgatggtgactgatcatcagatattgaaatatttagttgcgtttcagctgtgtttcgttgtttttgataaatcatattttgcgctccattctttaacaatttcttctaattggtttaactgtggtgctgttgcaattgagtatcttacatagcccttcatcaccggctcatcataaaagcgaggtttaaatccttgttcatatacgtattgtcctaattgttgcgccgctgaacctttagtaagtacaaaattggcatttgatgggaatactgacattttatctgcaacatgtgtatcaaatatttgttttaactgctcagctaattggcgttgcattgttaaaaatcgacttgtctcatctctatgtctaaaaatataagtcgcaatattcagcgtaaatacatttaatgggtagggatgttctattttttgaatacgctttatcgttcctgcagtactaattaagacgcctaatcttaagccggcaattccaaacgcctttgataatgtgcgcattcttaaaatgtgtggtgccatttcaacgtcatatgccatgccataatctaaatatgcttcatcaatgacaaagtatccgtttattgctttcatcttatctgcaatagctgttaaaaatgccgtatcaaattgcttgcctgaaggattatgtggattactcataataaaaaatgatggttgtacttcatcgattttcgttaaaatggtttccaaatcaaacgttaaatctgatcctgcatctacaaatgcaatttcacgatttacttgtgccgcatatgcttgatacataaaaaaatctggatttagcgttaatgccggaccttctggcattatcagcattaacttctgaatcaattcatcagagccatttcctgcaataatttgttcagacgataatccgtaaaacttagcataagcgtccttgaattgttcatatgctgcatcaggatataaattatatggcgttgcactaataatagccgtcattgttttttcatccaacggcgtaactggactttcatttttatcaatataaatcatttcaattacactcccctaagactgacgtattaatatggactgttggtgattgtataatgcttcaacatgagcaatatgttgtgctgaatcagcaatttgatcaaatgtatcttttgataaatggatgaccgtgttccgtgttaagaaatcattgaccgataacccattagtaaatctagctgttctatttgtaggtaatacatgactaggtcctgcagcgtaatctcctatgacctctggcgaataatgtccaataaacaatgcgcccacatatttcactttttcaatatatggttgaggatttactgtttgaatcgacgcatgttcaggcgcgattgtattcatgacatggcatgcttcatcaaaattactagcatggataaggtagtgttgattagcgatacttttagaaacaatgtcgtatctgtccacattaggcaatgctttagcaatacgtgattctaaatctttaaggacttgcgcatcttcactaatgacatatgtacgtgctaattcatcatgttctgcttgcgcaaatacatcatatacgatggcatctaaatctgcggtgtcatcaataatcagtgctatttctgttggtcctgcaatttgatcaatacctacctgtccaaataaatattttttggcatatgcaacaaattggttacctggacctacaatcttatcaactttaggtatcgtttctgttccataagtcaatgcagcaatactttgagcaccaccaacttgaaacacttgattaacttgcgtaatataacatgcagctaatacctcttgggatactccgttaggttgaggtggtgtcacaacaacaatattttctacacccgctacttgtgctaaagtcgctgtcattagaaccgttgatggataacttgctttgccaccaggcacataaatacccacactttctagtggatggtatatttcataacactccactgatttttctaactgttgattcgtctgcttaatactttcttgatatgctttaattctttcataactttgttgtaatgcttgttttgttttttcatctaatgtgtcaaatgctgctttaatttgttcatgactaatttctaaatgatctgttttcgtatgatcgaatgttagattatacattttcaaagccttatctccatgaactttaacttcctgacaaatatcgcgaataattggatacaatgactcatctaatggtgcttctaatgaaaattgatttaaaaattgttgtgcattaagcattggcaatagacacctccaaagagcgaataaattgctctattaattgtgattttttaaaataagctgctttattagttattaatcttgcattgatatcactaatatgttgcttttcaaccagtccgttcgcttttagcgtagtacctgtttgaacgatgtcgacaattccgtctaccatatcgacgacacaagctaattcaacagaaccattcaatttaatcaattcgacatcaatgccttttgatttaaaatatgtttcagcagtatgaacataactcgttgcgattttatgatattttgtcgtttcgggtttcgctgcgaccgcaaaataacatgctccaaaaggcatatccaacaaattattaacattgtaatgacgctcatctaaaatatcgctaccaacgataccaatatctgcaattccttgttccacatatattggcacgtcactcccttttactaaaatgcattctatattatctacacttaataataattggcgttctctattttttaatgtttctgataatgtcgtaaattcaattgcatctaaatagttaattaaactatccattagacgcccttttgctatggcgattcttaacattgtgcatactcccttacttaaagtgttaatcctaatccaaacccttcgatgcttcctttgtaataaccacctgttaaaactcgagattcattttcagcaaaatgacattgaataaataaacctgtgtaataggatctaggtggttgcgcagtaatatctaaatggatgtccttgtaaccttgtgtatgtaaccaatgttcccatatttttaattcaacgagtgctggatggtcatttggaatatagtgctccaatacatttaattgttgttgtgtattctctttcaagatttgcacgattggatgttcagtcgacaaatatgtaaccagtcccgataaattacgttcctcaatcattgatagtatgtctggtgtttgtaacgatttatcgagtaaggcatcaagcaattgataatgtcccaatacaacaaaatgcacgttgtctctcaactgctgttgaataaactgaataaatagctttaagctctgttgtacattcgctaatgatggtgcatagttttccaaaccaacttgtacagccgcttcattattccgaatgattaaacctgtgtatgccacttttgttgctgcagttggatacattgagtaataacgcaataattgatctgtaaaatcatttcgaagtgcataaatttgatgctcatgttgccaaaaatttcgctcacccatctgctgcaaatcctcatgattcaattgtttccagtccaacttttcaaccacactaaaatcaactaactcataatccgctttattaaaatattttaaaaatgctgtttccgattcttttaacgcaattaattgttctgaattattcactcgaccaccctttactttcaatactgtatttaaaatcacttggtatttttagtcgttcgctttacttctttaccatactaaagtgtaatatgcttaataacttatcatttttagcaatacattacaacctttttcagaaaattcggtgtattggttttaaattttttcaaaagaaaaaggcaagacatttgtgcctataaaaatgcttaaccaagatttttatattgaagttgtacttcttgcacatattgtccttgccttattatgtaaagttattttctttctatctttttattaaatttaactattcttcataatcccgattacctttaaagaattgtctatcttgtttactatatacattttcaggattaaaaaatggtttgagtttatatttaaattcaaataagtttagaccatcaatcgcaaccctatcttggtaaacgttcgttgctgatatatctgtaaaattgtttggaccgacacctgcaataaacttaaactctgcttcatctaccaaataattatacgcttgtgtatgtctatcctgtgcgccatgcggaaatacaaacatatctgttttacctacaattggttcaacttcatctttccatcttttagtatcacgtttaataccttctaaagatgttttttcaaaattaatgtgaccatatgaatgactcgcaaatgaccatccatcccgtttcattgcacgaacaacttcctcagccgcctttttattctttgtataatctttactcgttaattcattcgtgcgataacctaatacaccctcataaccggttaaagcaacaacacctttttcaccatttaaagaaaaatctggatgctcttttacaaatttatttaaaattggcacgatatcattgtcatcagaataagtagcatggccttttgagtctgtcgtttcagatacaacatgcttatttttatcaagtactaagcggtcagcataaccatggtgtctcatgtaactatagtaattcatatcatcaattgagataattagtggctttttacctttcggcaattttatttttttggcttttacatgatgagatgataagtcgtatacatcatgtgggttaacgatgatgtaattatttttatataatgcgttcaatgattttttaaattcacttacagtaatcatccaatcattgttgcccttagcttggtgtgtatctcctgtaaacgcaacttttgggtctgtaattaatggatgataaaacacatgatatacttggccgtgatatgtttcccaatgttcatccattttcgatttatgctttgcatactcatttggattaacagatttattttgagctttctcattttgcttggaacagctatataacaatgcaactgataataacagaaaaaatagcaataaatattttttatgcattaaacattctccctatgttttattatgcacaattataacatttttattatgtggctcataactttttaagaaactgttgggattttaattttattttttagataatgtcatagtattttatttataaaacacaatatctccttgactgataatgtcgtccattgtatcgtctcgcttgaaattaagcctttctgctaaatttattgaacgttggttacacttatttgtcctgataacttttactgtttcttgatcgatataattcacaaaatttgtgattgctgtaatagcctcacatgcgtacccttgtccttcaaaacttgtatgtaatttataaaataaatttagtactgtttcttgctttaattgtcgatattcatatccacaaataccaataacactacaatctatttttttcaccaatacaaagtaaccaaattgatattgttgccaatggtttcgccatttttcaatccaccgttgtgtgtctaatttggaattatgtaaacctttgggagtgtatatatttgcttgtggatgactacaaatattataaagttcaattaaatgcgaggaactcggaatcattaaatttaatctttcagtatttatcattaaatgtctccctcctatttctatttaaagactatttatatgaatactaatgccacgggttgaaatatcgactattatttaaaaagaataatgtaactactaacatcagaagtattaatgtcaaacacaaaacaacataatcgtctttttttaattgttttttgacgtaccaggttctccttttatactgtccgaattgtcttaactccatagcagtactaatagtgtcaattctttcgatactagaaaatattaaaggtaacacaatgcgtttgatacctttaacacggctagtaaatttcgcttttttcgaattatcatatcctcttgcttgttgcgcttgtgaaatattaaaatatgtttcttgaatatctggaatataccttaatgctagtgagactgcgtaactgattttataattcacacctagctgatttaaacttgcagcaaaatgactcggattcgttgtgaataaaaatattaacgctaaaggaactgtactaatatattttaatattagattaaaaagatagaataattcctgtgatgttagcgtaaatcgaccaataccattgattaactctgtacgctgattataaatcttcacaccatattcaggatcaaatatgtatacggcaataatatttaatattgtgaaaaacagaatgaatttaacaacaaaacgaacttttttccattcaatatgagcatatttgaacaataaaatagatgaagcactaattaaaattaaatatcttgtgtcataagtcaccattgcagaaatagaaacaactaataagaataaaagtttaacagtcgcatttaattgatgaatacgactatttcccgggtgaaaacctatagtattatattgattcattggcgtctcaccttcctatcatggttaataaataattgtactaatttctgtggctcactaatccctatatattcggccatttcaaatagcgatgtttgtctcaatgatgcaatctcacagatttttttatcatttaaaaccaatactggcgtggtatcagcaacgacttgaccttttgataatacaactgttcttgaactatactcagacaataaatgcatatcatgcgtaatcataataatcgtcttcccctgtctgtttagctcaattaaaaatgacattatctcattataatgatagaaatcttgaccagcagtcggttcatccaatatgattatttccggatttaagactaaaacagatgctatagtgaccctctttttttgaccatagcttaaagcggcaattggccaattccgaaatgcataaagtccgcatattttgagcacattctctacccgtatctttatatctgattctttcatacctcgtgctcttaaccctaatgctacttcatcgtaaatcattttttcggaaatcatatgatttggattttgcatcacataacctacgaattcagatcgttcgctaattgacaattgattaaatcccttattacaaaattggatattacctgttatatctaaaaatccacaaattgctttagcaagtgttgatttgccggcaccattgtgaccaactatactaagtatttctcttctataaacatttaattgaacattattaagtacactattactatagtcactatattgaacacacacctcatttaattctaatagcggttcagatttgtacttattatcattatttgaagatgttttttctatccattttttcactttaaatttaacatgttcactcatacaaacttcacgtaaattcgctaaattatcaatggattcaacatctacttctgcgtatttaagcgctgtacagtataatggttcacgtatgcctgcttctttaagcttagatgattttagcaaatcactaggcgttgtattagcgatgatttttccatctttaaaaagaagaactctatcaaacgtatcatctaatgattcttctaatcgatgttcgacaataatcatcgttgactttgtttcttcatgaatattatttaacaatctcagcgtttcatgtcctgtcgcaggatctaaattggccagtggctcatccaatattaaaataggggtacgatggattaatataccacctaatgaaacgcgttgtttttgacccccagataaatcttgcggtcggtgatttaaatgttctatcatatcaactttttcagcccaataactcacatttttcttcatatcatcttgttcaacacaattattttctaataaaaaggccatatcttcagctgctgttaagcctatgaactgtccatctgtatcttgtaaaactgtaccaacaacattagatctttcatgtaaacaactaacagttgcatcttgattatttatatgtagttccccagttacgttacctttagttttaaatggaattaatccatttatgcaatttgcaaaagtcgatttaccactacccgaagcaccaactactaatactttttctcccggataaatatcaacatttatattctgtaatgtaggtgttgcttgactatgatattgaaaactaaagtctttgaacgagataattggttcagtcatgatatatcattacctttctacattcatttacatatctgattcaacaaaataattattctttacgtaaactacctttttttatttgagatgaagcatatgcttttaataatattgtcccaataatgccaactgaaataatatttaatactgcagagataacaccttgtgtataaaccttgttagctggttcgttataaatcaaaatatctaatgttggtgcaataagtgcccagcaaataatattcgcaataatttgaccgatattaaaataaatcatcgccttcctagaaaatcggcctgaagaaagatttaattttaggccaatccatccatataaacagcctataattcccgagcaaataacccaactccaccaggcactaccgtatgtcgtgaaatctttaatagcgtgaccaattaatccagtcattaaaccagcaaaaggtccaaatattgcagatattaatgctaaaaatgcataagatgtttctatattcgtattaggaaaccctgttggtattacaacaaaacgccctaaaattacaaagaccgctgctcctataccaattgcaacaacagttttaactgaaatatcttgttttttcatcttcattactccttacataaaaaattcattaaatcgatggtgctttagataaatgaattgtccaatcatttccagtaccaatatgatataaatctgaaaatgagtcttgattgaccgctacaccaatatttactagcgagttaacatacacaagaggttcacccacattaacatctgcaaacgatcgcgcaaatttaataatattttgatagactttcttatcttgatgataaattgttaccaccaaattattaccatgaacaatttccaaggattttaagaatgccaatggaatatttgtccataatgacccaaatctgatatctaaaatatcaatgcttcctgtaacagaatcctcattttttgtcgcttctcttatttctaatgcctcaatactatcaacattaattgcctggccgagacgttcaaacgctatcttatttgcagctaatctcgcaccattgtatgcataaacatctctaccatgaaaagtatgactttcttccgaatgaggcaatcggcttttcacttcatcaatttcgataacttttttaataccttcgtaatgtttaatatgacttaaagaaccattatcaggtgtaataatgtaatgacctgaatatgttaagcaagcaatgctccgcctatcactacctacacccgggtctaccactgatacaaaaactgtgcctttaggccagtattttacagtttgatataaacgatatgatgctacccaaatgtcatacggtggtatatcatgcgttaagttttcgacacgtatatcatcacttacagtatatgcaactccatacattgcacttacagcgccatcactaagtccaaaatctgattgcaataccaaataatttcccataaaatgcctccttttttaaaacttcaaaaaaatattatctacatatttaatgttctatattttgaattttcagaattatattaaaatagtacgagtcacttgatacaaagtcaatagtagttactataaaaatgataataatagtcagatttatctcattaactaaatttattgaacgttggttacacttctttatgtttgaattaattgactagggtataacaatagtgtggtgttttataggtcattatttaaatacatcacataaaaatattcgaattcgaaataaaatgcttgcatctttattttgcaggtggtattgtatgtatatcaagtatataaaatatatctaagagataaaaatatggaggttttatattatgactaactttacttttgatggtgcacacagtagtttagaattccaaattaaacatttaatggtttctaaagtgaaaggttcatttgatcaatttgatgtagctgttgaaggagatattaatgacttaagtactttgaaagctactgcaacaattattccaagctcaattaacactaaaaacgaagcacgtgataaccacttaaaatctggtgatttctttggtactgacgaatttgataaaattacatttgtgacaaaatcagtatctgaaagcaaagttgttggtgatttaacaattaaaggcatcactaacgaagaaacattcgatgttgaattcaacggagtaagtaaaaatccaatggatggttctcaagtaacaggtgttattgttactggtacaatcaatagagaaaaatatggcattaactttaaccaagcacttgaaactggtggcgtaatgctaggtaaagatgtgaaattcgaagcttcagctgaattttcaatctcagaataatctcattacacaatcctcattgttttaatatatacgaaatgccaactatatcatccctaggtatagttggcattttttaacttctaattaaaaatcgctaagatttaaacttatattaagacacctttcattcaggtaggtcttattgaaactgaaaactttgatgaccttttgcaaagccattaaccgtataaagcatagatcctccgcccatttctatatcattggaacaaatgatgagttgatttgtgccaggtataaattgcggatgcgtagaacgtaacatatgcccttcatctcggcctggtatcaatatttgtcctattggataaccccttttattaaatactaatactcggccttgaccatacattgccacatataaattatcatctctatcaatacaacatgagtctggtccttcatgacctgtaaaatagtacggtatggtagctccaaatggttgtatcgtcacaccatcatcttcaagtgcaatgcgatgtaatcgattggctgttgtttctgttacccatagtactttttcatctgtacttaaagcaataccattggctacgctaatattttgaatgataggcgtcactgttctaaagtccggcgcaacataataaacgcctcctagtgggttggtagagtatcctctaaaatctgtaaaataaaatccacctttagaatcaaataccatgtcatcaatacaatatgttgttgaaagatcttcaataatatcttgtatgttgtcaccattttctgtcgctgcaaaaatgcctcctgtagatttaaaatctcctaaataacaaacgaataatcggccatctttatgtattttgattgctgcaggattcgctttatgacttacaaaaggttgtttaatttccttcgtttcaggattgactttgaaaatattaccttcgaatacatccaataaaaataattgtccttgccgattaaagttcaatccttctaattgcaatcctttttttgaaatttcaagccatggttcagctgtaattgtttgtaattcactttcagatataattggaacagcactattagacttcccgctataaaataatgtaggtaaatcttgttgtgacatcatgatcattcctttcatttcattcgttttaactatcatttttattttaaacaagggaacatttaaatcaaatgataacgttttcatttatctattttatcggtctagtggctgatttcaagctagaaatattgaatgacaatacaactctgttaaaatgatggacgtagataaatatgcgtattgacgctttattttaaaaattaacatgcttataacatgtttttagaaggagattaacctatgaactatcaagttcttttatattataaatatacgacgattgatgaccctgaacagtttgctcaggatcacttagccttttgtaaagcacaccatttaaaaggtagaattcttgtttctacagaaggtattaacggcacattatctggtacaaaagaagaaaccaaacaatatatggcacatatgcatgccgatgaacgattcaaagatatggtgtttaaaattgatgaagctgaaggacatgcttttaagaaaatgcatgtacgtcctcgaaaagagattgttgctttagatttagaagaagacgtcgatccaagacacacaactggccaatatttatcacctgtagaatttagaaaagctcttgaagatgatgacacagtcattattgatgcacgtaatgattatgaatttgatttaggtcatttccgaggtgcaattcgtccaaatatcacgcgctttagagatttgcctgactggattaaagagaataaagcgttatttgcagataaaaaagtggttacgtactgtactggtggcattcgatgtgaaaaattttctggatggcttttaaaagaaggtttcgaagatgtagcacaacttcatggcggtatagctacatatggtaaagatcctgaaacaaaaggtgaatattgggacggtaaaatgtacgtatttgatgaccgcatcagtgttaatatcaaccaagttgaaaaaacaattattggtaaggattggtttgatggcaaaccatgtgaacgttatattaattgcgctaaccctgaatgtaataagcaaatattagtttcagaagaaaatgaagccaaatatttaggtgcatgctcttatgaatgtgctaaacatgagcgtaatcgttatattcaagcaaacaatattagtgataacgagtggcaacatcgtttaacaaactttgatgatttacatcaacatgcttagttttaattaaatacctatcaaaacacgctttgaaaatccgatttataaaggtttttcagggctgttttttatgcgcatacataacctgatatgtttttaattatgcgcatgttatactaaattaaattttaatactgcggggtgtcttaaaatgcacattttagtaacaggatttgcgccttttgacaatcaaaatattaatccctcatgggaagctgtgtctctactagaaaatattattggcacacatacaatcgataaattaaaactaccaacctcttttaagaaagtagatactattataaataaaaagttggcatctaatcattatgatgttgtactagctataggacaagctggtggtagaaatgccattacaccagaacgtgtcgccattaatattgatgatgcacgtattccagataatgatgattttcaacctattgatcaagccattcatttagacggtgcgccagcttatttttcaaatttaccagttaaagcaatgactcaaagtattattaaccaaggacttccaggagcactttcaaatagtgcaggtacgtatgtatgtaatcacttgctttatcacttaggctatttacaagataagcattaccctcaccttcgattcggatttattcatgtgccatacataccagagcagattggtggtaaacccgatacaccatctataccattagaaaagatagttgcaggtttgactgcagccattgaagctatttctaatgatgaggatttacgtatagctctaggcacaacggaatagttataagagtaacaacaaaagcaccctaatttgttagtttaagtctaactttagggtgcttttggatgattggtatacagttttactataatgatgtattttagctaaacgacattgtttagtcttctttttttaacttcctaaaatttacaaatgtataaataataaatgctatatttagaatgatgagtatacttactgaaactaaattaaaagtgtctggttctttactaaagatagatgctatccttgctatcaaacttggcaatgaaattaccaacacgatgagcgcataaattttctgttttattaaaatacaaattacaataagcgcaattaaaagtactaacccaataatgaaactctgtttgtcacttaactcaaagaaactatagataggatattttttaataatcaagccacctaaaatcatccataaaaatacgataattccataagtcacatttataacatatgttattttttggtcaccaaatcggactaatgtattgcgtagaatcagcataccaatgacaacacctaaaataacgatactagctatatacaataaaaatgcaattgtcacatcgaatgtacccaaatctaaaaacataggaattataatgactgctaaagcaaaagcgaagtacaacgtaatatatttatataaaccggtagtaagacttatctcaggtgataactgatcagccattgacttaatcggtgtattaataattgaacttgtatcttcgttatttttttcagccatagttaaatgatcttcgagctcttccaatagttcttctacttcttcttcagttttacctctaaataacaattcaacacgtaatttttccaaaaaatcttgagactgtttacttaacatcgttttcccctccaaacaagttaatcattcctttattcaaagcttgccattttgatttaaatacttttaattcctttaaacctgactcggtaatcgtatagtactttcgccttgggccaccattactagatttttttatagtcgtatcaacgtatccttttttgtttaaacgcattaaaactggataaatactaccttcacttatctctggaaactcttgattcttaagtttcgtcataatttcatatccatatgtttcgccttgggcaatgagacctaatattgccccatctaagagacctttcataatctgatttgacactgacattttcatcacctactatcttacattataagatagtacattgaggacttttcgtcaactatcttatattataagttagtcatgatttacattccttaaatgactaacaaatttgttaatagggtaatacttacggaagtatgttttatttatgggggaggaattaataatgactacaaaaacagtatttgatgtcattgatatgggtttaggatatttagtaaatgtgtatgatgcttggaaagttgaaaaggtaattgatgattatcataagcctttttctaataccattcattggcaatttgggcatgtattaacaatttttgaatcggccttagctgttgctggtaaagagaatattgatttaaatatatatagacctttattcggaaatggttcgtctccagatgaatggaaggacgaagtaccgagtattggaacgattttagaaggtcttcaaacattacctgaacgtgtacgaaaactaactgaagatgatttagcaattgaattgaaacaaccaattgtcggttgtaataacttagaagagttattagtattaaatgccattcatatcccacttcatgctggtaaaattgaagaaatgtctcgtatattaaaaaatttaaaataaatatgtgcttattaaccgttaacaacacgttaacgggttttttatttgtttaaaaggccacttttagtctgcttacatacagattaaaagtgacctatttatatcatgtattatacatagaactaggaatatccttatctataaaaataattataatggtttatgagttaaatctttttcttaaaattaaatacaatcccaatatacctataaatacccatgtaatccatgaagttataatcttcataccagtttttggtaattcttttagaggattttcaggtttggttttattatctttaggttgatcatccttatccacttttgatggcttatctgggggagttggtttaactttattagaatgatcaggtttagttggtggtgttttgtcttttggtttttcaggatagattggtttattaggtttttctggcgtatatttattcgttacaatcaagctacctatatcattgttatccacatgtgttgtatagcctttaacttttgttaattcctcgactgtgtattttacttgttgaccttttgctttttcatctaatcctgtccacgtatgggtccagttattagattcatttaatgttgccgtttttcctgttgcttttccatcttgatataactcaactttgatttcagttggtcgttttccgtcttggttattattatcatcccaatttttcgttactgttgccgatgtctctcctggtgtatacttgttcgttattgtcgtaccgttgatgtctgttgtgtagtcttttacgtgatcttcggtcactgtatattctattttctttccttcatcatacttcggtaagtctttaaattcgtacttccagtttgtttcagatgtcacatctaacgtttttactttctctccattagccaataaattcacactgactttttctggtctcttaccatcttgattgtctttgtcgtcccatactttttcaccactaattgatgttgtttctggcgtatatttattcgtcacaatcaagttacccatatcattgttatccacatgtgttgtataacctttgacctttgttaattcctcgactgtgtattttacttgttgaccttttgctttttcatctaatcctgtccacgtatgtgtccagttattagattcatttaatgttgccgtttttcctgttgcttttccatcttgatatagctcaactttgatttcagttggtcgttttccgtcttggttattattatcatcccaattttttgttactgttgccgatgtctctcctggtgtatacttgttcattattgtcgtaccgttgatgtctgttgtgtagtcttttacgtgatcttcggtcactgtatattctattttctttccttcatcatacttcggtaagtctttaaattcgtacttccagtttgtttcagatgtcacgtctaacgtttttactttctctccgttagccaataaatttacactgactttttctggtctcttaccatcttgattgtctttatcgtcccatactttttcaccgctaattgatgttgtttcgattggtttttcagtattagtaaccactaaaccattttcttttttagtatatccttctggtgttgtatcttcaccttgagcatttacttctttaactaaatatttaatagtcttgccatttttgtcattttctggaagattagaccatgtcacttttgtcgttccatcttctaattttttaatctctgctttgtctactggtgttgtgttttgattgtcatcttgtttgtacaacttgaaataaatcgttggtttcactttttgagtgccttcccaaaccttttgagcagaaacatcttttgttttttctatcgcttttgcattttcaatagtcgtaaaatatccctgattatctgtatctttcatagtaaacggatattctttatccttatcaaatgtatacggtgctggcgcctctatttcttttaaaatatagtctccgctaggcaacgctttaatattagcaataccgtttgcatctgttataatctcaatttctttttgattgtcctttacaactgatccatcttttttagaaagtttaaattttacattagctataggagccttggtatctttatcctgttttaaaacttttaattcaccttttacagtaccttcaataccggcattagcattaatattatgcacagtatgattaaatgatttcccgttcacttcttccttaccatgctcttgataccaagcttgtgaattattaacaaactctttttgctgttcattcgtaattttggttttgtagttaattgaaaaactattatatgacccatagccttgtggaattgttacatcaattgtgttcttcgtattatcaacagttattttagaacctggaaaggctttttcaaaatcagtaattgcatttggtccactataataattgctatgtgtacctgtcacattaatgtttaatgtgcttaaatctaactgctgtccaccttgaatctgatcctttatagtaatatcttttgatacataacttttttcattgttaatatttaaaaaccatcgtacatgtgtcgtatcttttggcaacatatctcccgttttataatagaaaacactacttgttcccgcttcacttttatgaaccgtaacattcgttgatttattcccagatgttatcgtagctactttgtcatctgaagtatgtgtttgcgttaaatttcttccttgtacttcaaattctgcaaatcccgaaacatcacttaatttttctactttatcattgaatgtaattgttgcaccgtctgatttaataactgcttgacccacctgttcacctttaacagttaatggtactgttttactataaccttcaatctttactgtaccgcttgtcggccatgccactttaatcgtgtcaccattttgtatttttccatttttatcgtcgaatgtcatttttaccgtcgttttaccaccatcttctatcttagacggtgatacagttaaatctgtaacattcgttgatgaaatatctcgtgctgccaatgcgtcatttttattaaataaaggcgtgatgatatttaataacattataaagaccataaacttcaacacatttttgttcataaaaacccctccttatactctatgtcatatccataggatactaatgataaattataaactaatttagttcttattcaatggaatttatcaaaaattcatattattattttattatacaaaatatatacagtataacgaatacaagtgcatgaagttaacttgtatcaattattttcttagtatattagttcattttcaaaatcttttaaatttaataaacacccactataccagttcttcaccgcttctcgaaaaataattatattaatgatttcgttaatttaattttatatttaattattactgtacatcttttgaagttagctttattcttaaattgaaatatgtataaaacatagaaagaaggacgttttaacatggaaaacacggttaaatatcgtaagtttatactccctatcgttgtaggtctccttatttgggcacttacaccttttaaaccggatgctgtggatccaacagcatggtatatgttcgcaatattcgtcgcgacaatcattgcttgtattacacaaccgatgccaattggagctgtctctataattggatttacaatcatggtactcgttggcattgttgacatgaaaacggctgtcgctggttttggtaataatagtatatggttaattgctatggcatttttcatttcgagaggatttgtgaaaacaggtcttggtagacgtatcgcacttcatttcgtcaaattatttggtaaaaaaacattaggcttagcctattctatcgtcggtgtagatttaattctagcgcctgctacaccaagtaataccgcgcgtgcaggtggaatcatgttcccaattatcaaatcgctttctgaatcatttggttcgaaaccgaaagacggatcagcacgcaaaatgggtgcatttcttgttttcacagaattccaaggtaatttaattactgcggctatgtttttaactgcaatggccggtaacccccttgcacaaaatttagcatctagcacatctaatgttcacattacatggatgaattggttcctagctgctttagttcctggacttgtttccttaattgttgtaccttttattatttataaaatttatccaccaactgttaaagaaacaccaaatgctaagagttgggctgaaaatgaattagcgactatgggtaaaatcgctttagctgaaaaatttatgattggtatttttgtcattgctctaacactatggattgtcggaagtttcattcatattgatgcaactttaacagcctttattgcgctagcattgttattattgacaggcgtcttaacatggcaagacattttaaacgaaacaggtgcttggaacacattagtatggttctcagtgttagtgttaatggccgaccaattaaacaagcttggatttattccttggttaagtaaatccattgctacaagtcttggtggcttaagctggcctatagtactggtcattttaatattgttctacttctattcacattacttatttgcaagttctacagcacatatcagtgcgatgtatgcagcattactaggcgttgccatcgcagccggtgcaccaccattattcagtgcattaatgttaggtttcttcggtaacctattagcttcaacaacacactatagtagtggtccagcgccgattctattctcttcaggttacgtgactcaaaaacgttggtggacaatgaacttgatcttaggtttcgtctactttattatctggattggtttaggatcactttggatgaaagtaattggtatattttaaaatatttaaattagcgctcgaatctcattgatttgggcgctttttaatttgtatttaaaatcaatctttgctaaatcaagactccctttttaaaatacgtttatcctttaaatcattgcgtacttcactgaaaatttgtataaagatttaagtcattacgtaacatcacataaaatacatttctatattaatccgcttcgttgattaacattacttatgtatcataaatcatcaaacaaaaaacactttcgcttaaattcatttaattatgaattcaaagaaagtgctttattttatatttaatgtttcaaatttatacggctgtcactattactgcacacatacctcagtctcaccttaacatgacacaaaggaagttgaaaacacgtataattatctctcctcgtattttatagggtttttgcgactggatgtttcttcaatttaatgtattgagaaagactatataacacaatacctgtccaaataaatataaacgtaattaattgatctaaactaaaaggctctttgaaaacaaatatgccgagtacaaacattattgttggtccaacatattgaataaatcctattagcgaaagtggaatacgttttgccccggctgagaataggattagtggtattgccgtaatagcaccagaaaataacaaccaaaatgatgacatgttcaatccaaatgacatctgatgttgctgccataaataaataacgtatattagtccagcaggtgcggtaacaatacattcaatcgtaatactgctgatggcatcaatatgtactacttttttcaataatccatatgtaccaaaggataacgctaatataatagagacgattgggaattctccaattttcagtgtcatatatagtacaccaatgaatgcgaataatatggctaaccattcaaatttattgaatctttcttttaaaaagataagtgcgagtagaatactgacaagtggatttatataataacctaaacttgtttgtaggacgtgtccgttcgttacagcccaaataaatgtaccccaattcaaggtgatcacataacccgctacgacaattgctagtaattgaatgggcttggctaacaattgattcatatctcgttgaaatgcattgcgttgtttttgtccaaccgcgagtatgaaaatcatgaatattgctgaaaatataatacgaaaggctaaaatttcaaatgcgcctatttcatcaacgaattgccaatatataggtagtattccccacagaatgtatgcactgagtgctaaaaatataccttttttatattctgtattcacttacatacctccttactctcccaaatttttaacatgttacgctcacttagttatgctaatataacgattttactaataatatttcgataaagatatcattttgtttatatttcccacatttattcaccaaccactaaacaatattaattttataaataattctgtacaaatcagggtatattgccagaaagactaccatacaacataaaggatggatacaaatgactttacctaaaattggaaagcctgcaacacgcgcgttaaattcacaaggtatatacacattagaagcagtatcacaatatacgaagtcatctctaatggagatgcatggcgttggtcctaaagctatatcaatattggaacaagctttatttcagcaccaactacattttaaaacggaagttcattcatcattaccttttttattaacaggagatgtgtcatgcaatcatgcgcctaaacgtcaacaaatgatagattttatagttgctacagcagcattagatattgaattattacgttcactagttacaacagaatttatttggtctgtccctggccgctttgacatatacggacctcaaatattaattcaagaactatctaatcattacaatcaggttgctagtctcaatatccactccagcatcacacatgggtgcttaggttccatgcatggtattgaaatattaaaaactgataaagagattcattttgctcatttttttgaatttgaaaatcataaaaaggatgccaagttaagcaaagtgacatcttacattgttgttggttaatgtatcaaattatatatatcgcaaaaaattcttttgcggtcacatgtatatttttatataacaaataattttgcataacatttttgtcatatgaacacttattactagagtgcacattgaacatacagtatgattaaatatcatgttatgaaagaaggatatattttgactgttttaaaaaatgagcgcttaagctggttaccatacatagctattgtcattttgttacacgttattgggtttagttttttatggattgctggaaaagaccatcatatcttatttggtatggggattcttgcatatacattaggtttacgtcatgcatttgatgctgatcatattgccgcgatagataatacggttcgcaaattattacagcaacgcaaagatccatctggtgttggtttctacttttcaattggacattcatctgtcgtatttttaatggctgtttttttaggggtatctgtaaaatgggctaaagatgaattaccacatttccaagatattggtggaacgattggtacactagtttcaggtttctttttagtgcttatcggtgtgttgaatctaattattttaatctctttaattaacttgttcgctaaattacgacgtgaacacattgaagaagctgaagtcgatgcattacttgaatctagaggatttgtttctcgatttgtaggaccttatttcaaattaatcacgcgtagttggcacgtattgccacttggctttttatttggacttggttttgatacagctagtgaaattgcgttacttgctctttcttcaggcgcgtcacaacaagccatttcatttatcggaatcttatctttaccaattttattcgcatcaggtatgagtttgttggatactttagatggtgttgtaatgaaatatgcctataattgggcattcttcaatcctattcgcaaaatctattacaatataacgattactgcgatatccgtcatagctgcattagtgattgggatgattgaattgctgcaaattcttgctgataagctagacttacacggtgcattttgggcatttattagttcaatcgaatttgattatttaggctatattctagtcgctttatttttaataacttggcttatttcaagcttaatttggaagtttggtcgcatagaacacaaatggtctaaataaagtaacttgtcttgcaactacctttgtattgttacatttttagacatcctgcacacttcttccattatgctacactctcagtagtcatctttaaatcgtttcttttagagatgacttcattttgagagcgtatttttctatttaaaatgtgtttatccaaaattcaatactttcgaatttaaagtttcagcatttctgtttaaaatttaactataatctttaatacaggaggcgttatgcttatgaatattgcgaagttagaggattatttacaaattgattcatctcgttataatcgaccgagtattgaagcattaaattattatgcaactcgttttatgttaactataccttttgaaaatattgatgttcaaaatggtaagccgatatctataaatatcgatgcactttttaataaaattgttcgtgataaacgtggtggtttttgttatgagttaaatacatttttcaaaacctatttacaacaaaaaggatttaatcccgaattaatgtcagctactattcatacacccggtggcggtcgcagtctgaacggttcacatgcttcacttgttgtttctataaatgatgtattctatgtaactgatgttggctttggagacttacctctacacgccattcctattacttcgtcagagcatacacaaccgattactgacatcagtggtacgtttcgtgctatctttaacaacgaagacaaggatattttctatgttcaaaaattcgaaaatgataattggcatacaaaatatgaagctgaatttaaagctaaatgtattgcagattttgataaaaatattgaatataatcaaacgcatccagattcaatatttgtacagcatttattaattacaatgccacaatcgtttggccgtgctacaatgtctgaaaatcatttaactttgacaaaagcaaaggatggcatctcagaaaagttagctgtcactaaagataactatcaacattttttgaaaacatattttggcctagatgttactatcaatcgaattgaaaacagtgacagtaaatcataagcatacggacgtgacttactttaatgtaggtaacgtcctttttaaatacacatattcatcagagaatgggacagaaatgatacagcgccactaataattgatgatttagtggttcttacacattagccaaagctcgtgtgtacttataaataggcatgcatgagtaaaactgatgcacaagaaatactaatttctaaagaaaaagtatttctttatcgacactctgcgcaaacacaacaaaaaggatatggcacaaacttcatgccacacccttcttttgaaccgcttcattttacttaagcaagtgcatctacaacataaatgacacctacgaatacaaatgcaatagcaatcatcgtcgaaataaagacgatacccattaatggattaaataataaaatgacaccgaaaacaatacctaataaattaaaaatcactgaaattagttttaagctaccactacccgaaaacgtaaataatccagcgatagaactaaaaataaaccaaaaagcaaacatgtagataaaaaatgccgagctagcaccaacattaaaaatgacaataagaccaaagagaatatctacaatccccataaacagaatccaattttggttaccaccaactaaagctttggcttttctacgataaacaatttgaatcacaccattaatcaatacaaataatccaattaaccatgtgattgcataaaagttttcaattgggaacgtaaaaataacaactgctaacattaataacagcacacccataatcaaactagaccatttaattccttgatttcctttttccataacaatcatttcctttcaaacaacgccttctttatattttcattagtgccactattgttcattgattaaattccctcatcttaacttatagaaacatttcctcagtgcaaatactgcgatgctcaaattagttgaattgctttccaataatccaaattcacccgagaaaatcacgatatattaatatctttcaactatgtaagattcaaacattgaattgtaagtttagataaaggctactgttctacttattatttaaaatgaaattaaatacaaaaggagtgatactatgacgatattatcagtgcaacatgtttcaaaaacatacggtaaaaagcacacatttcaagcacttaaagatattaactttgacatacaaaaaggcgaattcgttgcgattatggggccttctggatcaggtaagacaaccttattaaatgtactaagttcaattgaccaaatttctagcggtagcgtgattgctaacgggcaagagcttaataaacttaatcaaaaagcacttgccaaattccgtaaagaatcattaggtttcatcttccaagattacagtattctgccgacattaactgttaaagaaaacattatgttacctttatctgttcaaaaaatgtcgaaggcaacaatggaagaaaattataaagcgatcacgacagcattaggtatttatgacctgggaaataaataccctagcgaattatctggtggtcaacaacaaagaactgcagcagcgagagcatttgttcataaacctcaaatcatatttgcagatgagccaacaggcgcactcgactcgaaaagtgcaaatgacttattacaacgtttggaagaaatgaataaatcgtttgataccactattgtcatggttacacatgatccggttgcagcaagttttgcagaacgtgtcatcatgctaaaagatggccaaattcatacacaactttatcaggaaggacgttctaaacaggccttttatgaagacattgtacatcttcaatcagtattaggtggtgtctcaaatgacatttaaccatatcgttttcaaaaacttacgccaaaacttaaaacattatgcaatgtatttattttcattattttttagcatcgtcttatatttcagttttacaaccttacagtttactaaaggtgtaaataatgacgactcgatggccatcattaagaaaggtgctttagtcggatcaatatttttatttatcattattgtcatctttttaatgtatgccaatcatttattcgtgaaacgccgtacacgtgaatttgcgctatttcagttgattggtttaacacgacaaaacattttgaaaatgttagcacttgaacaaatgattgtatttttaatcacaggtgttgtcggtgtattatgtggcattgcaggtgcacaattattgctttccattgtatctaaattgatgtcgttatcgattaacttatcgatacatttcgaacctatggcccttgttttaactattttaatgctaattattgcgtatatactgattttatttcaaagcagtttgtttttaaaaagacgcagtatcttatcaatgatgaaagactcaattaagactgatgttacaactgcgaaagtaacgactgcagaggttatttcaggcgtattaggtattgctatgattgcactaggctattatatggcgacagaaatgtttggtacgttcaaagcactaactatggctatgacatcaccgtttattattttatttttaacggttgtaggcgcctatttattcttcagaagttccgtgtcactgatttttaaaactttgaaaaaatctaaaaatggacgcgtatctattacagatgttgtatttacatcttctattatgtaccgaatgaagaaaaatgccatgtctttaactatcattgcaattatttctgcagttacagtaactgtattgtgttttgcggcattatctaaatcaaataccgatcaaacccttacatctatggcacccaatgattttaacgtggtcgcctctcaagatgcgcaacaatttgaatctaaactaagccaacaacatattacattttttaaaaatgcttacgaaactattactgtaaataatgttaaagatgaggttattactttggaaaatggtagtgattcaggtcgcacgaattctattttaagtgcaaatacaaagttaactggtaacaatgccatcattgcaaatacaaaatcacttcctaacattattaatatccatttaaacaaagatttagtagtaaaaggtactaagaatgaaactttccgtgttacacaagaagacaaaggtaaggtttatcccttaaatctaagcttcaactcacctgtcgtcgaagtaagtcctgaaaagtatcagcagttgaaaacacaaaataacgttcatactttttatgggtatgatattaaacaaacatcacaaaaggaaaaagctcaagcaattgcaaaacagtttggagacaaagtcatcacgtatgatgacatgaaaaaagaggtcgatgctactaacggtattctaatatttgttacatcatttttaggattagcatttttagtagcagctggatgtattatttatattaaacaaatggatgaaactgaggatgaactaagtaacttcagaatattaaaacgcataggctttacgcatacagatatgcttaagggattattattaaaaattactttcaacttcggtttaccattattgattgctatattacatgcagtattcgccgcaatagcatttatgaaattgatgggtaatatttccttcatgccggttattatagtaattgttgtatacacactcatttacattgcttttgctttaatcgcttttctacattcaaacaaattgattaagaaaaccatttaacacttgtgattaaaagatgattcattgagattttgattttaagcaatgcagtataactattaactgatttataaaaaggagagattgaatcatgcaatttagagaattagtaaaacaatcatacgaggatttgaaaaatttgactgtaacttggtataacgtgattgctttagcaatgattgttattgtcttaagctccgttacaacgccaattataggtattccagctggtttattaggtggcgcttattatttaaaacgccgtgaagaaaaaggtaaataaataagccttctgtgctaaactcaatatgtatttcctaccatagaaaacataaggagtttggacatcttgaaggagatactattgttggtcgtcgtcatggtagtgcaatcattactttggtagaaagagtatccaagatgattatcaccttacgacccttaggtcgtaaggcaactgatatagaaaacactctacactcaatgttttcatctttaccttctcatatatttaaatcaattacttttgattgtggtaaggagttctcaaactggaaaacaatatgtaactgtcacgatatatctatattttttgctgatccaggcacgccatcacagcgaggtttaaatgaacattctaacggaatacttagacgcagtggattagataaagaactggatttcaatttaataacggataatcatatcatcagtgttgttcaaaatatcaatcatcgtcctagaaaatctttaggttatagaacaccattggaagtatttatgagtttcatcgaagatgataaactgtccagcttaatttgacaatctaaagctatataaaaaagccgttggtctcttcgaaactacggcttttctccgtgctataaaatcagtatggcgaagcacagtgatcattgaattctgactttatataaccaagagtatctttggatacactgatgatatctataacagtattgctaatgtagaatatattttcttgattatagaatacaataaatggctccactaaaccttttttaatatataaagaataatcaattaagtctttgttttttatatttttaatagttgcaataacatacttctcatcggtagaatggatttcttcgtaccagttagtaatattaaaaaaacgaccaattcttgttttttctctaaatttaacaggatataagtattcagacaaaaatgtacatttcgtctttgattggttattaaatataacattaataatattagaaatttgctttttattgagaacatcaatatctaagcgtatcctatttttctcaggtgattgaaaatagggagtttcatgttctaaatcaaaatgtatttgttgtgtttcaagattaataatcattttaatctccaattctttttaggttagcatcgtatgtaccacttcttgttttcttgctacctaaattcttaatactgcttgcacctttccattttaccttctcatatatttaaatcaattacttttgattgtggtaaggagttctcaaactggaaaacaatatgtaactgtcacgatatatctatattttttgctgatccaggcacgccatcacagcgaggtttaaatgaacattctaacggaatacttagacgcagtggattagataaagaactagatttcaatttagtaacggatgatcatatcatcagtgttgttcaaaatatcaatcatcgtcctagaaaatctttaggttatagaacaccattagaagtatttatgagtttcatcgaagatgataaactgtccagcttaatttgacaatctaaagatttataaaaaaggagagattgaatcatgaaatttagagaattagtaaaacaatcatacgaggatttgaaaaatttgactgtaacttggtataacgtgattgctttagcaatgattgttattgtcttaagcgtagttacaacaccaataataggtattccagttggtttattaggtggcgcttattatttaaaacgccgcgaagaaaaaggtaaataaacgcattccatcagtatattacattgctttgaccttttatgtcaggttttaatatcaacaagtagcgtttatcgctgcttgttttttatgaattgcttataaaatcgtcatgtttaaacgatatgttactttgaaaacaaacaaataccataaaagactacatttttttatttttataaacccctttaaatcaacgtttctaaggtttttaaaaatctttttaaatttattttcaaaaaacactgtacattatgccaatatgagcgtatagttggacttacgtaataaaagctcgtgaattaaattgtagtgtatttgtttagaatatcctcttttttagttatgaatttgttacaaatattaagtgcaaaagcacatggaggttttctatatgaataacggtacagtaaaatggtttaacgcagaaaaaggttttggtttcatcgaacaagaaaatggcggagacgtattcgtacatttctcaggtatcgctagcgatggctacaaaactttagaagaaggtcaaaaagttactttcgaaatcactgaaggtcaacgtggagaccaagcagttaacgtacaaactgtttaatcttacaaaataaaacgactcattataaatgaatcgctttgattaccaacaaggttctaaatcttgttggtatttttttatgctattttggataatataaataatatgaggccataccacgatgatttataaaaacttatttgccaaatacacactaaggaaaattatgaggctgagtgtaccaactactgatataatagaaagcgcatttgtcatcgtatttctagctttagtcgtttgtacttcactaggatcttttccattcataaaagcaacaattcgatcgtagttgtccattttatgcactttttttaaatcttctattttcatagatgcataaaaacctattcccataatgattgccaccgttataccccaagtccaattccaataaacaactaaaggtcccattaaaattgcagctaatgccataaaaataagcatcacatatgtccataagttaagacttcgttgcgctttaatatcaggtacaaatggaatagtcccttttactaaatcatctaaagttacattgaacaattcgcacatcattaataagttatgtatgtctggtaagcttttgtcattttcccaattagaaatactctgcctagatacatataacttttcagcaagatattcttgtgaataaccatctcgttccctatattttttaatttgtttactcagattcaattacatacgcctccattcaattagtacaatcagactatcagacaaagttaaatcaagtcacctgtatgattgactaaatgttttgacatacgacaacatcagggttcgaagactcccttaagacagacctgtatgattacgcgcttgtaattttctcaatgccaacttgaatttcatttattaatgatgcaacttttccatgctattcaatgcttgcgaagttagtcctatttaagagattacgttcacactatttactattagtcctatttaagagattacgttcacaatatttactattcgattttccagctttccaactatgcttttctaatcttttttgtgctataaattctactgcttcaaaaatacatactgcactgatgaaccagcttaggaaaccaacaataatgctaatcaaccacatgtgcgtcatatgtaacatcatccatgtaactaaaatacaaactaatacccctgtcataccaaacactgcgccacgacttacatgcacagcgactttatcaccatattgcatacctgtaataaacatagacactaaaaatactgccggaaacgttgcaaatataccgccaaattctttccaaggtagtgttacagatacaatataacttaataatactgcaaatccccccacaaaaaatttcattaatgttaatttcatgatgttctgcctccaataatttattacttaataactgaatacaactaattatcacgcattttccaaactataaatgtctaatactgaatattgcgagggaaataacaaaccaacaaacaactgtgaatattgcgcctttccgataacctttatgattaatatagagagatgtcaaaaatacagttaatatacaagacagaataccgacaattgctccagtactaagattcatcgacatctccactaattgcgtaccacgatgatccaaagctaatgcgataatagccgcaagaaagactgccggcatagtagctataatacctcctaacttaccacctaccttatcagcaataattgaagctaatgcaacagcgataccaccaatgacaaaatgaagaattgcacttccaattgaaaacatcttcaacgtacctttctataattaattcaatacaaaacgtatcattcacacaaagtgtaaaacttaaattttctactgtaaaggcaactcaagcgatgttcataaagctttcatgatactttcataaactagcaataaagggttcaaataaaggtatatccagctcaaattagggagtgggacagaaatgatattttcgcaaaatttatttcgtcgtcccaccccaacttgcacattattgtaagctgactttccgccagcttctatgttggggccccgccaacttgcacattattgtaagctgacttttcgtcagcttctgtgttagggccctcaccccaactcgcattgcctgtagaatttcttttcgaaattctctgtgttggggcccctgactagaattgaaaaaagcttgttacaagcgcattttcgttcagtcaactactgccaatataacttcgtagagcatagaacattgatttatgtaccagcctgatcaacatataaatataaatttttatgtttcacgtaaaacaaaaaaagacaaagctgttattatcttagctttgtcttttatgtgttagtcatcatgtatacgacatcctactactaacgtttatatattcgaatttttatttcataataatcttcatgatctttgtctttatgctcaacatgtaatcctgtttgttgaatcgcttggatacttttgcctacctcatctcgtgcttgagtgacatcttgtgcaaagcgaaggttttgtgctttgactttttcgggccccgttttttggcgtactctatcttcagtctgtttcacatttagtttttgtgcaatgacttgctcaatcaacgcttcttgttcgctatcagacaatgataataccgctctcgcatggcgttcagtaattttaccttctcttaagcgaagtagtactttcggcgccaacttcaataaacgcaacttatttgcaataaagctttgacttttacctaaactttttgccaattcactttgcgttgtatcaccaatttccaataatttcttataggcttcagcttcttcaacaacagacaaattttctctttgaatattctcaattaatgccacaacagccgtctcttcatcatccatatcacgaataataacgtctgcttgaggtaaatttagtgattgtattgctctaaatcggcgctctccagcaataatttcaaacatatcttcttcaatcggtcttacaacaataggctgtaataaaccatgttcatgtattgattcagcaagttctttaattttatttggttcaaacacctgtcttggttgataacggttgggaacgatacgttcaatttgaatggattcaacattactattgcgatcttcttcaatatgtccaatgatgtcatctttgtttttcaaaccaaataattttgaaaaaggttttttcattatccattcgctccttttatgttagttgtaaaggattatgcattatttttcaagtaaaggagtcttattaggcgtccctggttttcttggatactttttcggcgtctgtctttttttatcaataatgaacatctggcgctctccagcatcttctggcaattcaaaggtatgtgtttctgtaacgttaccacctaacacactaattgcaaattttgcttcttctaattcttcttcaccttttgaagattttaatgcaacaaactgtccaccttttttaactagcggtaaacacaattcactcaacacggataatctagctactgctcttgcagtaacaacatcataagactccctgtagacacccttgccaaatgtttctgctctatcgtgtataaagctgacatcctgtaattgtaattctgacgctaaatggtttaaaaattgaatacgcttatttaatgaatcaacaatcgtcacttttaactgcggaaacattatttttaacggaatacttggaaaaccagctccagcgcctacatcacatatacttataggctgattaaaatcaaaataaaaactaggtgcaatggaatcataaaaatgtttcaaatatacatcgtgttcatctgtaatacttgtcaaattcatcttttcattccattcaacaagtaaacgataatatgtttgaaactgttgtttttgagtctcagttaattcaatattatgttcttttaattgttctgctaaccattctacagtcattagtcactcaccctttggagtttaccttgttctaagtaaatcaataatatagatatgtctgctggatttacccctgatattctagaagcttgtgcaatatttaaaggttttacttctgataatttttctcgcgcttcagtcgccaaactatcaatcttactataatctaagtcttctggaattttcttctcttccatacgcttaactttctcaacttgttgtagtgatttattgatataaccttcatattttgtttgtatttctacttgttcttcaacatctgcattcaattgatgttcttcttctaaaatttctaaaattatatcgtaagtcatttcaggtctgcgtaataaatcgatagctaaaataccatcttttaagcgagaaccaccatgttgttcaataatcgcttgcgtatgttcgtttggtttaatacgaatatctgataaacgcttaatttccgcatcaatttgctgacgtttttcattaaaacgtgcatatcgttcttcagaaatcataccaagttcatatcccatatccgtcaatctcaaatcagcattatcatgacgtagtaacaaacgatattctgcacgtgatgttagtaaacgataaggttcattagtacctttagttacaagatcatcgattaatacaccaatatatgcatctgaacgacttaatatcttttcgcctgcgtttaacactttacctgcagcgttaatacctgccatcaatccttgtcctgctgcttcttcataaccagatgtaccattaatttgacctgcagtgtataagtttttaatcattttcgtttcaagtgtaggccataactgcgttggcacaatcgcatcatattcaattgcgtagccggcacgcatcatatctgctttttcaagacctggtatcgtctctaacatttgacgttgcacatgttcaggaagacttgtagacaatccttgtacatatacttcatttgtattacgaccttcaggctctaagaaaagttgatgtcgcggcttatcattaaatcgaacaaatttatcttcaattgaagggcaataacgtggcccggttcctttaatcatccctgaatacattgcagatagatgtaaattatcatcgataactttgtgtgtttcagcattagtatacgttagccaacatggcaattggtctaatatatattctgttgtttcaaagctgaatgcacgacctacatcgtcacctggttgtatttcagtcttcgaatagtcaattgtttttgaatttacacgcggtggtgtacctgttttaaaacgaacaatatcaaaaccaagttctcttaaattgtctgataatgtgattgatggtaattggtgatttggtccacttgaatacttcatattacctaaaatgatttcaccacgtaaaaatgttcccgttgtaataattactgctttagataaatactctgtaccaatatttgtacgtacacctttaacttcattatcttctataataagttcgtctaccataccttgcattatatgcaaattttcttcatcttcaatcacgcgtttcatttcttgttgataaagtactttatctgcttgcgctcttagtgctcttacagcaggtcctttaccagtatttaacattctcatttgaatgtgtgttttatcgattgtttttgccatttgtccacctaaagcatcaatttcacgaacaacgatacctttagctggtccacctacagatgggttacatggcataaatgcaatattatctaaatttattgttagcattaatgttttagcaccacgtcttgcagatgctaaacctgcttctacacctgcatgtcccgcacctataacgattacatcatattcttgagccacaatataaacctccttatttgatatcttactagccttctttagacggtattccgtctaattcaattactatttacctaagcagaattgactgaataactgatcgatgagttcatcacttgcagtctcaccaataatttctcctaatatttcccaagttctagttaaatcaatttgtaccatatccataggcacaccagattctgctgcatcaatcgcatcttgtatcgtttgtcttgcttgttttaataatgaaatatgtcttgaattagaaacataagtcatatcttgattttgtacttctccaccaaagaacaaatctcgaatttgtatttctaattcatcaataccttcttgttttaacattgaagtttgaattaatggcgtatcgcctatcatatctttaacttcattaatatctatattttgctctaaatccattttattaacaattacgattacatcttcatttttaaccacttcatataatgtgtaatcttcttgagtcaatgcttcgttattgtttaatacaaataaaattaagtctgcttggctaagagcctttctagagcgttcaacaccaatcttctctactatatcttctgtctcacgtataccagcagtatcaactaatcttaatggcacgccacgaacattgacgtactcttctaagacatctctagtcgtacccgctacctcagttacaatcgctttattatcttgtattaaattatttaacatcgatgatttacctacgtttggtttaccaacaataactgtagataaaccttcacgcataattttaccctgcgcaccggtatctaataaacgattaatttcctgtttgatttctttagactgctctaaaagaaattcagtagtcgcatcttcaacatcatcgtattcaggataatcaatattcacttccacttgagcgagtatctctaatatagattgacgttgttttttgattaagtcacttagacgaccttcaatttgattcatcgcaactttagaagctctatctgttttcgagcgaataaagtccataactgcttcagcttgagataaatcaatacgaccatttaaaaaggcacgttttgtaaattcacctggatcagccattctagcgccatatgtcatagtaagttccagcactctattaatagttaaaataccaccatgacaattaatttctataatatcttcgcgtgtaaatgtttttggcgctcttaacacagacaccataacttcttcaaccacttctttagactctggatcaataatatgaccgtaattaatcgtatgtgatggaacatcatttaaaagatgttttcctttatataatttgtcagcaatttcaacggcttgcggtccagacaatcgaacaattccaattgccccttcacccattggtgttgaaatactcgtaattgtatctaaatccatattgctactcgcctccttcaacgatgtgaatacattttaaagtaagttattatatccctgaggttagtcttacgcttgtctgaggtaagacttcgggatgtgttgagtagttaatgttttactccctttcccctaccctatccttacttaatctttttattaaaaactttggcaattttaagtacgtgctcaagactattctgtatttgtaaagtcgtcatatctttagctggctgtcttgctattacaataatatctttggccaatatatgcgacttatgtactttgaaattttcacgtattgctctttttatcttgtttcttaacactgcattacctagttttttagaaacactaatacctaagcgaaaatggtctatttctttattattacaagtgtatacaacaaattgtctgttggctacagaatgaccttttttatatattctctgaaaatctgcattctttttaattcggtaagatttttccaataacatcactcgcttatttatcgtttttatttgaagctatatttaaacttctattgagcttataacataaatttctatttattcttaatttaaacgaaaaaaagatcactgatgagtcagtgatcttatgcagataaaactttacggcctttacgacgacggcgcgctaaaactttacggccattttttgtgctcatgcgttttctgaaaccatgaactttactatgtttacgtttatttggttgataagtacgttttaccatgcaaaacacctccatctttatacagttatctaatataccagattatgcagactctgatcactttaatagataagattttgcgtttcttagattaaaattctcgtattagctcattgattatctagtcataattcaagcaactactacaatataacaaaatcctttttataacgcaagttcattttatactactgctcaatttttttacttttatcgattaaagatagaaatacacgatgcgagcaatcaaatttcataacatcaacatgagtttggtccgaaacatgagtgtttacaatgtttgaataccttatacagttcttatacatactttataaattatttcccaagctgttttgatacacacactaacagatactctatagaaggaaaagttatccacttatgcacatttatagttttcagaattgtggataattagaaattacacacaaagttatactatttttagcaacatattcacaggtatttgacatatagagaactgaaaaagtataattgtgtggataagtcgtccaactcatgattttataaggatttatttattgatatttacataaaaatactgtgcataactaataagcaggataaagttatccaccgattgtt
